United States Patent Application Publication US 2021/0308171 A1 - sequence listing, part 2

SEQ ID NO: 30474 - DNA, 20 bp, Artificial Sequence
  Synthetic
gcagtcacctcaaaggccag

SEQ ID NO: 30475 - DNA, 20 bp, Artificial Sequence
  Synthetic
cctccgtgcagtcacctcaa

SEQ ID NO: 30476 - DNA, 20 bp, Artificial Sequence
  Synthetic
cctgtagtttgaccctgagc

SEQ ID NO: 30477 - DNA, 20 bp, Artificial Sequence
  Synthetic
gtttgaccctgagctggtgc

SEQ ID NO: 30478 - DNA, 20 bp, Artificial Sequence
  Synthetic
ccgagaccagcaccagctca

SEQ ID NO: 30479 - DNA, 20 bp, Artificial Sequence
  Synthetic
ccctgagctggtgctggtct

SEQ ID NO: 30480 - DNA, 20 bp, Artificial Sequence
  Synthetic
gccgagaccagcaccagctc

SEQ ID NO: 30481 - DNA, 20 bp, Artificial Sequence
  Synthetic
gagctggtgctggtctcggc

SEQ ID NO: 30482 - DNA, 20 bp, Artificial Sequence
  Synthetic
gcaggatttgactcagccat

SEQ ID NO: 30483 - DNA, 20 bp, Artificial Sequence
  Synthetic
caggatttgactcagccatc

SEQ ID NO: 30484 - DNA, 20 bp, Artificial Sequence
  Synthetic
aggatttgactcagccatcg

SEQ ID NO: 30485 - DNA, 20 bp, Artificial Sequence
  Synthetic
ctcagccatcggggaccctg

SEQ ID NO: 30486 - DNA, 20 bp, Artificial Sequence
  Synthetic
cctcacctcagggtccccga

SEQ ID NO: 30487 - DNA, 20 bp, Artificial Sequence
  Synthetic
aaggcaaggccctcacctca

SEQ ID NO: 30488 - DNA, 20 bp, Artificial Sequence
  Synthetic
caaggcaaggccctcacctc

SEQ ID NO: 30489 - DNA, 20 bp, Artificial Sequence
  Synthetic
ctggttccaggggcaaatgc

SEQ ID NO: 30490 - DNA, 20 bp, Artificial Sequence
  Synthetic
gcgtggcctgcatttgcccc

SEQ ID NO: 30491 - DNA, 20 bp, Artificial Sequence
  Synthetic
gtgggcgaagcactctggcg

SEQ ID NO: 30492 - DNA, 20 bp, Artificial Sequence
  Synthetic
gtgaggtgggcgaagcactc

SEQ ID NO: 30493 - DNA, 20 bp, Artificial Sequence
  Synthetic
ctgcagcagctgtgtgaggt

SEQ ID NO: 30494 - DNA, 20 bp, Artificial Sequence
  Synthetic
cctgcagcagctgtgtgagg

SEQ ID NO: 30495 - DNA, 20 bp, Artificial Sequence
  Synthetic
ccacctcacacagctgctgc

SEQ ID NO: 30496 - DNA, 20 bp, Artificial Sequence
  Synthetic
gcacctgcagcagctgtgtg

SEQ ID NO: 30497 - DNA, 20 bp, Artificial Sequence
  Synthetic
cacacagctgctgcaggtgc

SEQ ID NO: 30498 - DNA, 20 bp, Artificial Sequence
  Synthetic
cagctgctgcaggtgctggc

SEQ ID NO: 30499 - DNA, 20 bp, Artificial Sequence
  Synthetic
ctgctgcaggtgctggccgg

SEQ ID NO: 30500 - DNA, 20 bp, Artificial Sequence
  Synthetic
tgcaggtgctggccggcggc

SEQ ID NO: 30501 - DNA, 20 bp, Artificial Sequence
  Synthetic
gcaggtgctggccggcggcc

SEQ ID NO: 30502 - DNA, 20 bp, Artificial Sequence
  Synthetic
cacggcacagacccggccgc

SEQ ID NO: 30503 - DNA, 20 bp, Artificial Sequence
  Synthetic
cggccgggtctgtgccgtgc

SEQ ID NO: 30504 - DNA, 20 bp, Artificial Sequence
  Synthetic
cctccagcacggcacagacc

SEQ ID NO: 30505 - DNA, 20 bp, Artificial Sequence
  Synthetic
ccgggtctgtgccgtgctgg

SEQ ID NO: 30506 - DNA, 20 bp, Artificial Sequence
  Synthetic
ctccccagtcacctccagca

SEQ ID NO: 30507 - DNA, 20 bp, Artificial Sequence
  Synthetic
ctcccagggcggctaccacc

SEQ ID NO: 30508 - DNA, 20 bp, Artificial Sequence
  Synthetic
actccaggtggtagccgccc

SEQ ID NO: 30509 - DNA, 20 bp, Artificial Sequence
  Synthetic
cggctaccacctggagtcac

SEQ ID NO: 30510 - DNA, 20 bp, Artificial Sequence
  Synthetic
ctaccacctggagtcactgg

SEQ ID NO: 30511 - DNA, 20 bp, Artificial Sequence
  Synthetic
actccgccagtgactccagg

SEQ ID NO: 30512 - DNA, 20 bp, Artificial Sequence
  Synthetic
ctgactccgccagtgactcc

SEQ ID NO: 30513 - DNA, 20 bp, Artificial Sequence
  Synthetic
catgacagtacagacgctgc

SEQ ID NO: 30514 - DNA, 20 bp, Artificial Sequence
  Synthetic
atgacagtacagacgctgct

SEQ ID NO: 30515 - DNA, 20 bp, Artificial Sequence
  Synthetic
caacatcaccttcatgggcc

SEQ ID NO: 30516 - DNA, 20 bp, Artificial Sequence
  Synthetic
caaagggatgcagcttctcc

SEQ ID NO: 30517 - DNA, 20 bp, Artificial Sequence
  Synthetic
aagctgcatccctttgatgc

SEQ ID NO: 30518 - DNA, 20 bp, Artificial Sequence
  Synthetic
atccctttgatgccggaaaa

SEQ ID NO: 30519 - DNA, 20 bp, Artificial Sequence
  Synthetic
tccctttgatgccggaaaat

SEQ ID NO: 30520 - DNA, 20 bp, Artificial Sequence
  Synthetic
ccccattttccggcatcaaa

SEQ ID NO: 30521 - DNA, 20 bp, Artificial Sequence
  Synthetic
ccctttgatgccggaaaatg

SEQ ID NO: 30522 - DNA, 20 bp, Artificial Sequence
  Synthetic
gccccattttccggcatcaa

SEQ ID NO: 30523 - DNA, 20 bp, Artificial Sequence
  Synthetic
gatcactttgccccattttc

SEQ ID NO: 30524 - DNA, 20 bp, Artificial Sequence
  Synthetic
aaagtgatcaatttcctaaa

SEQ ID NO: 30525 - DNA, 20 bp, Artificial Sequence
  Synthetic
ggggaccttccatacctttt

SEQ ID NO: 30526 - DNA, 20 bp, Artificial Sequence
  Synthetic
gcttctgtctgacagcatgc

SEQ ID NO: 30527 - DNA, 20 bp, Artificial Sequence
  Synthetic
tctgtctgacagcatgctgg

SEQ ID NO: 30528 - DNA, 20 bp, Artificial Sequence
  Synthetic
gtctgacagcatgctggtgg

SEQ ID NO: 30529 - DNA, 20 bp, Artificial Sequence
  Synthetic
acagcatgctggtggaggcg

SEQ ID NO: 30530 - DNA, 20 bp, Artificial Sequence
  Synthetic
cagcatgctggtggaggcgc

SEQ ID NO: 30531 - DNA, 20 bp, Artificial Sequence
  Synthetic
catgctggtggaggcgcggg

SEQ ID NO: 30532 - DNA, 20 bp, Artificial Sequence
  Synthetic
ggtggaggcgcgggaggcct

SEQ ID NO: 30533 - DNA, 20 bp, Artificial Sequence
  Synthetic
ggaggcgcgggaggcctcgg

SEQ ID NO: 30534 - DNA, 20 bp, Artificial Sequence
  Synthetic
ggcgcgggaggcctcggagg

SEQ ID NO: 30535 - DNA, 20 bp, Artificial Sequence
  Synthetic
ggcctcggaggaggacctgc

SEQ ID NO: 30536 - DNA, 20 bp, Artificial Sequence
  Synthetic
caccagcaggtcctcctccg

SEQ ID NO: 30537 - DNA, 20 bp, Artificial Sequence
  Synthetic
ctcggaggaggacctgctgg

SEQ ID NO: 30538 - DNA, 20 bp, Artificial Sequence
  Synthetic
acctgctggtggtgcacacg

SEQ ID NO: 30539 - DNA, 20 bp, Artificial Sequence
  Synthetic
gcctcgtgtgcaccaccagc

SEQ ID NO: 30540 - DNA, 20 bp, Artificial Sequence
  Synthetic
gcgctatcttaatgagctca

SEQ ID NO: 30541 - DNA, 20 bp, Artificial Sequence
  Synthetic
tgtgatggtagcaacagcaa

SEQ ID NO: 30542 - DNA, 20 bp, Artificial Sequence
  Synthetic
aacgggggggatttctgtga

SEQ ID NO: 30543 - DNA, 20 bp, Artificial Sequence
  Synthetic
tggggaggaagataacgggg

SEQ ID NO: 30544 - DNA, 20 bp, Artificial Sequence
  Synthetic
ttggggaggaagataacggg

SEQ ID NO: 30545 - DNA, 20 bp, Artificial Sequence
  Synthetic
gttggggaggaagataacgg

SEQ ID NO: 30546 - DNA, 20 bp, Artificial Sequence
  Synthetic
agttggggaggaagataacg

SEQ ID NO: 30547 - DNA, 20 bp, Artificial Sequence
  Synthetic
aagttggggaggaagataac

SEQ ID NO: 30548 - DNA, 20 bp, Artificial Sequence
  Synthetic
gaagttggggaggaagataa

SEQ ID NO: 30549 - DNA, 20 bp, Artificial Sequence
  Synthetic
tctgcacaaggaagttgggg

SEQ ID NO: 30550 - DNA, 20 bp, Artificial Sequence
  Synthetic
tccccaacttccttgtgcag

SEQ ID NO: 30551 - DNA, 20 bp, Artificial Sequence
  Synthetic
tcctctgcacaaggaagttg

SEQ ID NO: 30552 - DNA, 20 bp, Artificial Sequence
  Synthetic
ttcctctgcacaaggaagtt

SEQ ID NO: 30553 - DNA, 20 bp, Artificial Sequence
  Synthetic
cttcctctgcacaaggaagt

SEQ ID NO: 30554 - DNA, 20 bp, Artificial Sequence
  Synthetic
caacttccttgtgcagagga

SEQ ID NO: 30555 - DNA, 20 bp, Artificial Sequence
  Synthetic
tcagcaccttcctctgcaca

SEQ ID NO: 30556 - DNA, 20 bp, Artificial Sequence
  Synthetic
ttgtgcagaggaaggtgctg

SEQ ID NO: 30557 - DNA, 20 bp, Artificial Sequence
  Synthetic
ggaaggtgctgaggcccctt

SEQ ID NO: 30558 - DNA, 20 bp, Artificial Sequence
  Synthetic
aggccccttcggacccagac

SEQ ID NO: 30559 - DNA, 20 bp, Artificial Sequence
  Synthetic
cctcctgtctgggtccgaag

SEQ ID NO: 30560 - DNA, 20 bp, Artificial Sequence
  Synthetic
ccccttcggacccagacagg

SEQ ID NO: 30561 - DNA, 20 bp, Artificial Sequence
  Synthetic
tcctcctgtctgggtccgaa

SEQ ID NO: 30562 - DNA, 20 bp, Artificial Sequence
  Synthetic
ttcctcctgtctgggtccga

SEQ ID NO: 30563 - DNA, 20 bp, Artificial Sequence
  Synthetic
cattatggttcctcctgtct

SEQ ID NO: 30564 - DNA, 20 bp, Artificial Sequence
  Synthetic
ccattatggttcctcctgtc

SEQ ID NO: 30565 - DNA, 20 bp, Artificial Sequence
  Synthetic
ccagacaggaggaaccataa

SEQ ID NO: 30566 - DNA, 20 bp, Artificial Sequence
  Synthetic
acaggaggaaccataatggt

SEQ ID NO: 30567 - DNA, 20 bp, Artificial Sequence
  Synthetic
ccccaccccacctaccatta

SEQ ID NO: 30568 - DNA, 20 bp, Artificial Sequence
  Synthetic
gtctccaaaggcggggaagc

SEQ ID NO: 30569 - DNA, 20 bp, Artificial Sequence
  Synthetic
aaaggcggggaagctggctg

SEQ ID NO: 30570 - DNA, 20 bp, Artificial Sequence
  Synthetic
gggaagctggctgtggagcg

SEQ ID NO: 30571 - DNA, 20 bp, Artificial Sequence
  Synthetic
agctggctgtggagcgaggc

SEQ ID NO: 30572 - DNA, 20 bp, Artificial Sequence
  Synthetic
gctggctgtggagcgaggct

SEQ ID NO: 30573 - DNA, 20 bp, Artificial Sequence
  Synthetic
gcgaggctgggccatcaacg

SEQ ID NO: 30574 - DNA, 20 bp, Artificial Sequence
  Synthetic
cgaggctgggccatcaacgt

SEQ ID NO: 30575 - DNA, 20 bp, Artificial Sequence
  Synthetic
ccagcactcacccacgttga

SEQ ID NO: 30576 - DNA, 20 bp, Artificial Sequence
  Synthetic
ctctgcccttccgcaggggg

SEQ ID NO: 30577 - DNA, 20 bp, Artificial Sequence
  Synthetic
cacggtcgctggagcagtgg

SEQ ID NO: 30578 - DNA, 20 bp, Artificial Sequence
  Synthetic
caccactgctccagcgaccg

SEQ ID NO: 30579 - DNA, 20 bp, Artificial Sequence
  Synthetic
cgccacggtcgctggagcag

SEQ ID NO: 30580 - DNA, 20 bp, Artificial Sequence
  Synthetic
cactgctccagcgaccgtgg

SEQ ID NO: 30581 - DNA, 20 bp, Artificial Sequence
  Synthetic
actgctccagcgaccgtggc

SEQ ID NO: 30582 - DNA, 20 bp, Artificial Sequence
  Synthetic
ctgctccagcgaccgtggcg

SEQ ID NO: 30583 - DNA, 20 bp, Artificial Sequence
  Synthetic
tgctccagcgaccgtggcgg

SEQ ID NO: 30584 - DNA, 20 bp, Artificial Sequence
  Synthetic
gaagcccccgccacggtcgc

SEQ ID NO: 30585 - DNA, 20 bp, Artificial Sequence
  Synthetic
aggcacagaagcccccgcca

SEQ ID NO: 30586 - DNA, 20 bp, Artificial Sequence
  Synthetic
cgggggcttctgtgcctatg

SEQ ID NO: 30587 - DNA, 20 bp, Artificial Sequence
  Synthetic
ggcgagcgtgatgtccgcat

SEQ ID NO: 30588 - DNA, 20 bp, Artificial Sequence
  Synthetic
ggacatcacgctcgccatca

SEQ ID NO: 30589 - DNA, 20 bp, Artificial Sequence
  Synthetic
tgctcatagacacaccttga

SEQ ID NO: 30590 - DNA, 20 bp, Artificial Sequence
  Synthetic
gcagtttctgtttgagcgtg

SEQ ID NO: 30591 - DNA, 20 bp, Artificial Sequence
  Synthetic
gtttctgtttgagcgtgtgg

SEQ ID NO: 30592 - DNA, 20 bp, Artificial Sequence
  Synthetic
tttctgtttgagcgtgtgga

SEQ ID NO: 30593 - DNA, 20 bp, Artificial Sequence
  Synthetic
agcgtgtggagggcatctcc

SEQ ID NO: 30594 - DNA, 20 bp, Artificial Sequence
  Synthetic
gcgtgtggagggcatctcca

SEQ ID NO: 30595 - DNA, 20 bp, Artificial Sequence
  Synthetic
aagatcaatgatggtagccc

SEQ ID NO: 30596 - DNA, 20 bp, Artificial Sequence
  Synthetic
atgggcatcaagatcaatga

SEQ ID NO: 30597 - DNA, 20 bp, Artificial Sequence
  Synthetic
cattgatcttgatgcccatc

SEQ ID NO: 30598 - DNA, 20 bp, Artificial Sequence
  Synthetic
ctgcagggcactcacctgat

SEQ ID NO: 30599 - DNA, 20 bp, Artificial Sequence
  Synthetic
cctgcagggcactcacctga

SEQ ID NO: 30600 - DNA, 20 bp, Artificial Sequence
  Synthetic
gtgacctccccacagggcaa

SEQ ID NO: 30601 - DNA, 20 bp, Artificial Sequence
  Synthetic
tgacctccccacagggcaat

SEQ ID NO: 30602 - DNA, 20 bp, Artificial Sequence
  Synthetic
tgggcatgagcgagacttca

SEQ ID NO: 30603 - DNA, 20 bp, Artificial Sequence
  Synthetic
cgacaagcgtgtgtacatca

SEQ ID NO: 30604 - DNA, 20 bp, Artificial Sequence
  Synthetic
tacaaccgccacatctaccc

SEQ ID NO: 30605 - DNA, 20 bp, Artificial Sequence
  Synthetic
acaaccgccacatctaccca

SEQ ID NO: 30606 - DNA, 20 bp, Artificial Sequence
  Synthetic
caaccgccacatctacccag

SEQ ID NO: 30607 - DNA, 20 bp, Artificial Sequence
  Synthetic
ggtcccctgggtagatgtgg

SEQ ID NO: 30608 - DNA, 20 bp, Artificial Sequence
  Synthetic
agcggtcccctgggtagatg

SEQ ID NO: 30609 - DNA, 20 bp, Artificial Sequence
  Synthetic
gcttggcaaagcggtcccct

SEQ ID NO: 30610 - DNA, 20 bp, Artificial Sequence
  Synthetic
cgcttggcaaagcggtcccc

SEQ ID NO: 30611 - DNA, 20 bp, Artificial Sequence
  Synthetic
gcagcttacgcttggcaaag

SEQ ID NO: 30612 - DNA, 20 bp, Artificial Sequence
  Synthetic
taggggcagcagcttacgct

SEQ ID NO: 30613 - DNA, 20 bp, Artificial Sequence
  Synthetic
tctctctcccagaggccatc

SEQ ID NO: 30614 - DNA, 20 bp, Artificial Sequence
  Synthetic
ctctcccagaggccatcagg

SEQ ID NO: 30615 - DNA, 20 bp, Artificial Sequence
  Synthetic
cccagaggccatcaggcgga

SEQ ID NO: 30616 - DNA, 20 bp, Artificial Sequence
  Synthetic
accttccgcctgatggcctc

SEQ ID NO: 30617 - DNA, 20 bp, Artificial Sequence
  Synthetic
agaggccatcaggcggaagg

SEQ ID NO: 30618 - DNA, 20 bp, Artificial Sequence
  Synthetic
cagctccaccttccgcctga

SEQ ID NO: 30619 - DNA, 20 bp, Artificial Sequence
  Synthetic
catcaggcggaaggtggagc

SEQ ID NO: 30620 - DNA, 20 bp, Artificial Sequence
  Synthetic
ggcggaaggtggagctggag

SEQ ID NO: 30621 - DNA, 20 bp, Artificial Sequence
  Synthetic
gcggaaggtggagctggagt

SEQ ID NO: 30622 - DNA, 20 bp, Artificial Sequence
  Synthetic
cggaaggtggagctggagtg

SEQ ID NO: 30623 - DNA, 20 bp, Artificial Sequence
  Synthetic
ggagctggagtggggcacag

SEQ ID NO: 30624 - DNA, 20 bp, Artificial Sequence
  Synthetic
cacagaggatgatgagtacc

SEQ ID NO: 30625 - DNA, 20 bp, Artificial Sequence
  Synthetic
ggatgatgagtacctggata

SEQ ID NO: 30626 - DNA, 20 bp, Artificial Sequence
  Synthetic
tgatgagtacctggataagg

SEQ ID NO: 30627 - DNA, 20 bp, Artificial Sequence
  Synthetic
agtacctggataaggtggag

SEQ ID NO: 30628 - DNA, 20 bp, Artificial Sequence
  Synthetic
tgttcctctccaccttatcc

SEQ ID NO: 30629 - DNA, 20 bp, Artificial Sequence
  Synthetic
gaacatcaagaaatccctcc

SEQ ID NO: 30630 - DNA, 20 bp, Artificial Sequence
  Synthetic
gtcgggcaggtgctcctgga

SEQ ID NO: 30631 - DNA, 20 bp, Artificial Sequence
  Synthetic
cgtcgggcaggtgctcctgg

SEQ ID NO: 30632 - DNA, 20 bp, Artificial Sequence
  Synthetic
ccacgtcgggcaggtgctcc

SEQ ID NO: 30633 - DNA, 20 bp, Artificial Sequence
  Synthetic
ccaggagcacctgcccgacg

SEQ ID NO: 30634 - DNA, 20 bp, Artificial Sequence
  Synthetic
ggagcacctgcccgacgtgg

SEQ ID NO: 30635 - DNA, 20 bp, Artificial Sequence
  Synthetic
tgtataccaccacgtcgggc

SEQ ID NO: 30636 - DNA, 20 bp, Artificial Sequence
  Synthetic
gcattgtataccaccacgtc

SEQ ID NO: 30637 - DNA, 20 bp, Artificial Sequence
  Synthetic
tgcattgtataccaccacgt

SEQ ID NO: 30638 - DNA, 20 bp, Artificial Sequence
  Synthetic
gacgtggtggtatacaatgc

SEQ ID NO: 30639 - DNA, 20 bp, Artificial Sequence
  Synthetic
tgcaggcaccgacatcctcg

SEQ ID NO: 30640 - DNA, 20 bp, Artificial Sequence
  Synthetic
gcaggcaccgacatcctcga

SEQ ID NO: 30641 - DNA, 20 bp, Artificial Sequence
  Synthetic
caggcaccgacatcctcgag

SEQ ID NO: 30642 - DNA, 20 bp, Artificial Sequence
  Synthetic
aggcaccgacatcctcgagg

SEQ ID NO: 30643 - DNA, 20 bp, Artificial Sequence
  Synthetic
gcggtccccctcgaggatgt

SEQ ID NO: 30644 - DNA, 20 bp, Artificial Sequence
  Synthetic
atcctcgagggggaccgcct

SEQ ID NO: 30645 - DNA, 20 bp, Artificial Sequence
  Synthetic
tcctcgagggggaccgcctt

SEQ ID NO: 30646 - DNA, 20 bp, Artificial Sequence
  Synthetic
ccccaaggcggtccccctcg

SEQ ID NO: 30647 - DNA, 20 bp, Artificial Sequence
  Synthetic
cctcgagggggaccgccttg

SEQ ID NO: 30648 - DNA, 20 bp, Artificial Sequence
  Synthetic
ctcgagggggaccgccttgg

SEQ ID NO: 30649 - DNA, 20 bp, Artificial Sequence
  Synthetic
tcgagggggaccgccttggg

SEQ ID NO: 30650 - DNA, 20 bp, Artificial Sequence
  Synthetic
tgatggacagccccccaagg

SEQ ID NO: 30651 - DNA, 20 bp, Artificial Sequence
  Synthetic
ggctgatggacagcccccca

SEQ ID NO: 30652 - DNA, 20 bp, Artificial Sequence
  Synthetic
ggggctgtccatcagcccag

SEQ ID NO: 30653 - DNA, 20 bp, Artificial Sequence
  Synthetic
aggacgtaccgctgggctga

SEQ ID NO: 30654 - DNA, 20 bp, Artificial Sequence
  Synthetic
aagggtcaggacgtaccgct

SEQ ID NO: 30655 - DNA, 20 bp, Artificial Sequence
  Synthetic
caagggtcaggacgtaccgc

SEQ ID NO: 30656 - DNA, 20 bp, Artificial Sequence
  Synthetic
cctaacagggcatcgtgaag

SEQ ID NO: 30657 - DNA, 20 bp, Artificial Sequence
  Synthetic
ctaacagggcatcgtgaagc

SEQ ID NO: 30658 - DNA, 20 bp, Artificial Sequence
  Synthetic
catcgtgaagcgggatgagc

SEQ ID NO: 30659 - DNA, 20 bp, Artificial Sequence
  Synthetic
agcgggatgagctggtgttc

SEQ ID NO: 30660 - DNA, 20 bp, Artificial Sequence
  Synthetic
ggatgagctggtgttccgga

SEQ ID NO: 30661 - DNA, 20 bp, Artificial Sequence
  Synthetic
ctggtgttccggatggtccg

SEQ ID NO: 30662 - DNA, 20 bp, Artificial Sequence
  Synthetic
tccggatggtccgtggccgc

SEQ ID NO: 30663 - DNA, 20 bp, Artificial Sequence
  Synthetic
cccggcggccacggaccatc

SEQ ID NO: 30664 - DNA, 20 bp, Artificial Sequence
  Synthetic
ccggatggtccgtggccgcc

SEQ ID NO: 30665 - DNA, 20 bp, Artificial Sequence
  Synthetic
ggatgggcacccggcggcca

SEQ ID NO: 30666 - DNA, 20 bp, Artificial Sequence
  Synthetic
ccataaggatgggcacccgg

SEQ ID NO: 30667 - DNA, 20 bp, Artificial Sequence
  Synthetic
ccgccgggtgcccatcctta

SEQ ID NO: 30668 - DNA, 20 bp, Artificial Sequence
  Synthetic
tcaccataaggatgggcacc

SEQ ID NO: 30669 - DNA, 20 bp, Artificial Sequence
  Synthetic
cctgaggtcaccataaggat

SEQ ID NO: 30670 - DNA, 20 bp, Artificial Sequence
  Synthetic
cccatccttatggtgacctc

SEQ ID NO: 30671 - DNA, 20 bp, Artificial Sequence
  Synthetic
gcctgaggtcaccataagga

SEQ ID NO: 30672 - DNA, 20 bp, Artificial Sequence
  Synthetic
atccttatggtgacctcagg

SEQ ID NO: 30673 - DNA, 20 bp, Artificial Sequence
  Synthetic
tccttatggtgacctcaggc

SEQ ID NO: 30674 - DNA, 20 bp, Artificial Sequence
  Synthetic
acccgcctgaggtcaccata

SEQ ID NO: 30675 - DNA, 20 bp, Artificial Sequence
  Synthetic
gcgcttctggtacccgcctg

SEQ ID NO: 30676 - DNA, 20 bp, Artificial Sequence
  Synthetic
tgatgcgggctgtgcgcttc

SEQ ID NO: 30677 - DNA, 20 bp, Artificial Sequence
  Synthetic
tatggagtcagcaatgatgc

SEQ ID NO: 30678 - DNA, 20 bp, Artificial Sequence
  Synthetic
gtatggagtcagcaatgatg

SEQ ID NO: 30679 - DNA, 20 bp, Artificial Sequence
  Synthetic
caggccaaacagattaagta

SEQ ID NO: 30680 - DNA, 20 bp, Artificial Sequence
  Synthetic
tggaaattattattatggac

SEQ ID NO: 30681 - DNA, 20 bp, Artificial Sequence
  Synthetic
ggaaattattattatggaca

SEQ ID NO: 30682 - DNA, 20 bp, Artificial Sequence
  Synthetic
cggattctatgaggcttcat

SEQ ID NO: 30683 - DNA, 20 bp, Artificial Sequence
  Synthetic
gcggattctatgaggcttca

SEQ ID NO: 30684 - DNA, 20 bp, Artificial Sequence
  Synthetic
tgggtcatgcggattctatg

SEQ ID NO: 30685 - DNA, 20 bp, Artificial Sequence
  Synthetic
acagcaagttatgggtcatg

SEQ ID NO: 30686 - DNA, 20 bp, Artificial Sequence
  Synthetic
ataatttaacagcaagttat

SEQ ID NO: 30687 - DNA, 20 bp, Artificial Sequence
  Synthetic
cataatttaacagcaagtta

SEQ ID NO: 30688 - DNA, 20 bp, Artificial Sequence
  Synthetic
cataacttgctgttaaatta

SEQ ID NO: 30689 - DNA, 20 bp, Artificial Sequence
  Synthetic
ttatggcttatacagaaaaa

SEQ ID NO: 30690 - DNA, 20 bp, Artificial Sequence
  Synthetic
tcttcggcagtggctttatg

SEQ ID NO: 30691 - DNA, 20 bp, Artificial Sequence
  Synthetic
ttcttcggcagtggctttat

SEQ ID NO: 30692 - DNA, 20 bp, Artificial Sequence
  Synthetic
tttcttcggcagtggcttta

SEQ ID NO: 30693 - DNA, 20 bp, Artificial Sequence
  Synthetic
ttttgtcatttcttcggcag

SEQ ID NO: 30694 - DNA, 20 bp, Artificial Sequence
  Synthetic
gtgatattttgtcatttctt

SEQ ID NO: 30695 - DNA, 20 bp, Artificial Sequence
  Synthetic
atgagtatatcaaatttcta

SEQ ID NO: 30696 - DNA, 20 bp, Artificial Sequence
  Synthetic
ctatactcagacatgttatc

SEQ ID NO: 30697 - DNA, 20 bp, Artificial Sequence
  Synthetic
ccatcttccacagttaatgt

SEQ ID NO: 30698 - DNA, 20 bp, Artificial Sequence
  Synthetic
gaagattgtccagtgtttga

SEQ ID NO: 30699 - DNA, 20 bp, Artificial Sequence
  Synthetic
tcaaagagtccatcaaacac

SEQ ID NO: 30700 - DNA, 20 bp, Artificial Sequence
  Synthetic
gagttttgtcagctctcaac

SEQ ID NO: 30701 - DNA, 20 bp, Artificial Sequence
  Synthetic
ttttgtcagctctcaactgg

SEQ ID NO: 30702 - DNA, 20 bp, Artificial Sequence
  Synthetic
ctctcaactggcggttcagt

SEQ ID NO: 30703 - DNA, 20 bp, Artificial Sequence
  Synthetic
aaaccgacaacagactgata

SEQ ID NO: 30704 - DNA, 20 bp, Artificial Sequence
  Synthetic
cagccatatcagtctgttgt

SEQ ID NO: 30705 - DNA, 20 bp, Artificial Sequence
  Synthetic
agactgatatggctgttaat

SEQ ID NO: 30706 - DNA, 20 bp, Artificial Sequence
  Synthetic
gactgatatggctgttaatt

SEQ ID NO: 30707 - DNA, 20 bp, Artificial Sequence
  Synthetic
gatatggctgttaattgggc

SEQ ID NO: 30708 - DNA, 20 bp, Artificial Sequence
  Synthetic
atggctgttaattgggctgg

SEQ ID NO: 30709 - DNA, 20 bp, Artificial Sequence
  Synthetic
gctaagaaatcagaagcatc

SEQ ID NO: 30710 - DNA, 20 bp, Artificial Sequence
  Synthetic
atactttagtaattcaagga

SEQ ID NO: 30711 - DNA, 20 bp, Artificial Sequence
  Synthetic
taacatactttagtaattca

SEQ ID NO: 30712 - DNA, 20 bp, Artificial Sequence
  Synthetic
attgatatagatattcatca

SEQ ID NO: 30713 - DNA, 20 bp, Artificial Sequence
  Synthetic
atagatattcatcatggtga

SEQ ID NO: 30714 - DNA, 20 bp, Artificial Sequence
  Synthetic
tacaacagatcgtgtaatga

SEQ ID NO: 30715 - DNA, 20 bp, Artificial Sequence
  Synthetic
acggtatcattccataaata

SEQ ID NO: 30716 - DNA, 20 bp, Artificial Sequence
  Synthetic
cggtatcattccataaatat

SEQ ID NO: 30717 - DNA, 20 bp, Artificial Sequence
  Synthetic
ggtatcattccataaatatg

SEQ ID NO: 30718 - DNA, 20 bp, Artificial Sequence
  Synthetic
gaaagtattccccatattta

SEQ ID NO: 30719 - DNA, 20 bp, Artificial Sequence
  Synthetic
aaatatggggaatactttcc

SEQ ID NO: 30720 - DNA, 20 bp, Artificial Sequence
  Synthetic
ggggaatactttcctggcac

SEQ ID NO: 30721 - DNA, 20 bp, Artificial Sequence
  Synthetic
ttcctggcacaggagacttg

SEQ ID NO: 30722 - DNA, 20 bp, Artificial Sequence
  Synthetic
tcctggcacaggagacttga

SEQ ID NO: 30723 - DNA, 20 bp, Artificial Sequence
  Synthetic
accctcaagtctcctgtgcc

SEQ ID NO: 30724 - DNA, 20 bp, Artificial Sequence
  Synthetic
aattatgtattttaggatat

SEQ ID NO: 30725 - DNA, 20 bp, Artificial Sequence
  Synthetic
gtattttaggatattggtgc

SEQ ID NO: 30726 - DNA, 20 bp, Artificial Sequence
  Synthetic
taggatattggtgctggaaa

SEQ ID NO: 30727 - DNA, 20 bp, Artificial Sequence
  Synthetic
gtcaattttccaatgagaga

SEQ ID NO: 30728 - DNA, 20 bp, Artificial Sequence
  Synthetic
tcatctataccatctctcat

SEQ ID NO: 30729 - DNA, 20 bp, Artificial Sequence
  Synthetic
ggtatagatgatgagtcata

SEQ ID NO: 30730 - DNA, 20 bp, Artificial Sequence
  Synthetic
gtatagatgatgagtcatat

SEQ ID NO: 30731 - DNA, 20 bp, Artificial Sequence
  Synthetic
ttgtgtgtagattatctcaa

SEQ ID NO: 30732 - DNA, 20 bp, Artificial Sequence
  Synthetic
gtagattatctcaaaggtga

SEQ ID NO: 30733 - DNA, 20 bp, Artificial Sequence
  Synthetic
gatgtatcaacctagtgctg

SEQ ID NO: 30734 - DNA, 20 bp, Artificial Sequence
  Synthetic
cactgtaataccacagcact

SEQ ID NO: 30735 - DNA, 20 bp, Artificial Sequence
  Synthetic
agtgctgtggtattacagtg

SEQ ID NO: 30736 - DNA, 20 bp, Artificial Sequence
  Synthetic
tgtggtgcagactcattatc

SEQ ID NO: 30737 - DNA, 20 bp, Artificial Sequence
  Synthetic
ctcattatctggtgatagac

SEQ ID NO: 30738 - DNA, 20 bp, Artificial Sequence
  Synthetic
tcattatctggtgatagact

SEQ ID NO: 30739 - DNA, 20 bp, Artificial Sequence
  Synthetic
tgtttcaatctaacagtcaa

SEQ ID NO: 30740 - DNA, 20 bp, Artificial Sequence
  Synthetic
aacttaccattactgatgct

SEQ ID NO: 30741 - DNA, 20 bp, Artificial Sequence
  Synthetic
ttaccattactgatgcttgg

SEQ ID NO: 30742 - DNA, 20 bp, Artificial Sequence
  Synthetic
cctcctccaagcatcagtaa

SEQ ID NO: 30743 - DNA, 20 bp, Artificial Sequence
  Synthetic
ccattactgatgcttggagg

SEQ ID NO: 30744 - DNA, 20 bp, Artificial Sequence
  Synthetic
ttactgatgcttggaggagg

SEQ ID NO: 30745 - DNA, 20 bp, Artificial Sequence
  Synthetic
tccgtaatgttgctcgatgt

SEQ ID NO: 30746 - DNA, 20 bp, Artificial Sequence
  Synthetic
tccaacatcgagcaacatta

SEQ ID NO: 30747 - DNA, 20 bp, Artificial Sequence
  Synthetic
tccctgtttcctcaccgtag

SEQ ID NO: 30748 - DNA, 20 bp, Artificial Sequence
  Synthetic
ttctccccacccccaggagc

SEQ ID NO: 30749 - DNA, 20 bp, Artificial Sequence
  Synthetic
ttcatagggtgtccagctcc

SEQ ID NO: 30750 - DNA, 20 bp, Artificial Sequence
  Synthetic
ccaggcgatggggcttcata

SEQ ID NO: 30751 - DNA, 20 bp, Artificial Sequence
  Synthetic
ccctatgaagccccatcgcc

SEQ ID NO: 30752 - DNA, 20 bp, Artificial Sequence
  Synthetic
gccaggcgatggggcttcat

SEQ ID NO: 30753 - DNA, 20 bp, Artificial Sequence
  Synthetic
tgggtcaatgccaggcgatg

SEQ ID NO: 30754 - DNA, 20 bp, Artificial Sequence
  Synthetic
atgggtcaatgccaggcgat

SEQ ID NO: 30755 - DNA, 20 bp, Artificial Sequence
  Synthetic
tatgggtcaatgccaggcga

SEQ ID NO: 30756 - DNA, 20 bp, Artificial Sequence
  Synthetic
ccaggctatgggtcaatgcc

SEQ ID NO: 30757 - DNA, 20 bp, Artificial Sequence
  Synthetic
cctggcattgacccatagcc

SEQ ID NO: 30758 - DNA, 20 bp, Artificial Sequence
  Synthetic
gtaatgcaggaccaggctat

SEQ ID NO: 30759 - DNA, 20 bp, Artificial Sequence
  Synthetic
cgtaatgcaggaccaggcta

SEQ ID NO: 30760 - DNA, 20 bp, Artificial Sequence
  Synthetic
catagcctggtcctgcatta

SEQ ID NO: 30761 - DNA, 20 bp, Artificial Sequence
  Synthetic
agagaccgtaatgcaggacc

SEQ ID NO: 30762 - DNA, 20 bp, Artificial Sequence
  Synthetic
tcttatagagaccgtaatgc

SEQ ID NO: 30763 - DNA, 20 bp, Artificial Sequence
  Synthetic
cgaggtcttcaagccatacc

SEQ ID NO: 30764 - DNA, 20 bp, Artificial Sequence
  Synthetic
tcatgttgggaggcctggta

SEQ ID NO: 30765 - DNA, 20 bp, Artificial Sequence
  Synthetic
acatgtcatgttgggaggcc

SEQ ID NO: 30766 - DNA, 20 bp, Artificial Sequence
  Synthetic
gcggcacatgtcatgttggg

SEQ ID NO: 30767 - DNA, 20 bp, Artificial Sequence
  Synthetic
gaagcggcacatgtcatgtt

SEQ ID NO: 30768 - DNA, 20 bp, Artificial Sequence
  Synthetic
ggaagcggcacatgtcatgt

SEQ ID NO: 30769 - DNA, 20 bp, Artificial Sequence
  Synthetic
catgtgccgcttccactccg

SEQ ID NO: 30770 - DNA, 20 bp, Artificial Sequence
  Synthetic
tgtagtcctcggagtggaag

SEQ ID NO: 30771 - DNA, 20 bp, Artificial Sequence
  Synthetic
agtcaatgtagtcctcggag

SEQ ID NO: 30772 - DNA, 20 bp, Artificial Sequence
  Synthetic
caggaagtcaatgtagtcct

SEQ ID NO: 30773 - DNA, 20 bp, Artificial Sequence
  Synthetic
tggtggggctgactctctgc

SEQ ID NO: 30774 - DNA, 20 bp, Artificial Sequence
  Synthetic
gtcagccccaccaatatgca

SEQ ID NO: 30775 - DNA, 20 bp, Artificial Sequence
  Synthetic
tgaagccttgcatattggtg

SEQ ID NO: 30776 - DNA, 20 bp, Artificial Sequence
  Synthetic
gtgaagccttgcatattggt

SEQ ID NO: 30777 - DNA, 20 bp, Artificial Sequence
  Synthetic
ggtgaagccttgcatattgg

SEQ ID NO: 30778 - DNA, 20 bp, Artificial Sequence
  Synthetic
cttggtgaagccttgcatat

SEQ ID NO: 30779 - DNA, 20 bp, Artificial Sequence
  Synthetic
gttgaaggcattaagactct

SEQ ID NO: 30780 - DNA, 20 bp, Artificial Sequence
  Synthetic
agtcttaatgccttcaacgt

SEQ ID NO: 30781 - DNA, 20 bp, Artificial Sequence
  Synthetic
ccagtcatcgcctacgttga

SEQ ID NO: 30782 - DNA, 20 bp, Artificial Sequence
  Synthetic
ccttcaacgtaggcgatgac

SEQ ID NO: 30783 - DNA, 20 bp, Artificial Sequence
  Synthetic
ccctgcagcccagtgtttcc

SEQ ID NO: 30784 - DNA, 20 bp, Artificial Sequence
  Synthetic
cctgcagcccagtgtttccc

SEQ ID NO: 30785 - DNA, 20 bp, Artificial Sequence
  Synthetic
caaagagcccgggaaacact

SEQ ID NO: 30786 - DNA, 20 bp, Artificial Sequence
  Synthetic
tcaaagagcccgggaaacac

SEQ ID NO: 30787 - DNA, 20 bp, Artificial Sequence
  Synthetic
gagcagaactcaaagagccc

SEQ ID NO: 30788 - DNA, 20 bp, Artificial Sequence
  Synthetic
cgagcagaactcaaagagcc

SEQ ID NO: 30789 - DNA, 20 bp, Artificial Sequence
  Synthetic
gagttctgctcgcgttacac

SEQ ID NO: 30790 - DNA, 20 bp, Artificial Sequence
  Synthetic
tacacaggcgcatctctgca

SEQ ID NO: 30791 - DNA, 20 bp, Artificial Sequence
  Synthetic
agcaacccagctgaacaaca

SEQ ID NO: 30792 - DNA, 20 bp, Artificial Sequence
  Synthetic
tgtcaccttgttgttcagct

SEQ ID NO: 30793 - DNA, 20 bp, Artificial Sequence
  Synthetic
atgtcaccttgttgttcagc

SEQ ID NO: 30794 - DNA, 20 bp, Artificial Sequence
  Synthetic
tctgtgatattgccattaac

SEQ ID NO: 30795 - DNA, 20 bp, Artificial Sequence
  Synthetic
ctgtgatattgccattaact

SEQ ID NO: 30796 - DNA, 20 bp, Artificial Sequence
  Synthetic
gatattgccattaactgggc

SEQ ID NO: 30797 - DNA, 20 bp, Artificial Sequence
  Synthetic
attgccattaactgggctgg

SEQ ID NO: 30798 - DNA, 20 bp, Artificial Sequence
  Synthetic
cagaccaccagcccagttaa

SEQ ID NO: 30799 - DNA, 20 bp, Artificial Sequence
  Synthetic
gcaccatgccaagaagtttg

SEQ ID NO: 30800 - DNA, 20 bp, Artificial Sequence
  Synthetic
tcacctcaaacttcttggca

SEQ ID NO: 30801 - DNA, 20 bp, Artificial Sequence
  Synthetic
ctcactcacctcaaacttct

SEQ ID NO: 30802 - DNA, 20 bp, Artificial Sequence
  Synthetic
actgtcttgccataggcctc

SEQ ID NO: 30803 - DNA, 20 bp, Artificial Sequence
  Synthetic
gttgacatagcagaagccag

SEQ ID NO: 30804 - DNA, 20 bp, Artificial Sequence
  Synthetic
tatgtcaacgacattgtgat

SEQ ID NO: 30805 - DNA, 20 bp, Artificial Sequence
  Synthetic
cgacattgtgattggcatcc

SEQ ID NO: 30806 - DNA, 20 bp, Artificial Sequence
  Synthetic
ctacttacttgagcagctcc

SEQ ID NO: 30807 - DNA, 20 bp, Artificial Sequence
  Synthetic
ttccctctaggtaccaccct

SEQ ID NO: 30808 - DNA, 20 bp, Artificial Sequence
  Synthetic
tccctctaggtaccaccctc

SEQ ID NO: 30809 - DNA, 20 bp, Artificial Sequence
  Synthetic
caatgtagagcacccgaggg

SEQ ID NO: 30810 - DNA, 20 bp, Artificial Sequence
  Synthetic
tgtcaatgtagagcacccga

SEQ ID NO: 30811 - DNA, 20 bp, Artificial Sequence
  Synthetic
atgtcaatgtagagcacccg

SEQ ID NO: 30812 - DNA, 20 bp, Artificial Sequence
  Synthetic
attgacattgacatccacca

SEQ ID NO: 30813 - DNA, 20 bp, Artificial Sequence
  Synthetic
attgacatccaccatggtga

SEQ ID NO: 30814 - DNA, 20 bp, Artificial Sequence
  Synthetic
ttgacatccaccatggtgac

SEQ ID NO: 30815 - DNA, 20 bp, Artificial Sequence
  Synthetic
tgacatccaccatggtgacg

SEQ ID NO: 30816 - DNA, 20 bp, Artificial Sequence
  Synthetic
cttgaaccccgtcaccatgg

SEQ ID NO: 30817 - DNA, 20 bp, Artificial Sequence
  Synthetic
cttcttgaaccccgtcacca

SEQ ID NO: 30818 - DNA, 20 bp, Artificial Sequence
  Synthetic
aagctttctacctcactgac

SEQ ID NO: 30819 - DNA, 20 bp, Artificial Sequence
  Synthetic
agctttctacctcactgacc

SEQ ID NO: 30820 - DNA, 20 bp, Artificial Sequence
  Synthetic
ccgtcatgacccggtcagtg

SEQ ID NO: 30821 - DNA, 20 bp, Artificial Sequence
  Synthetic
cctcactgaccgggtcatga

SEQ ID NO: 30822 - DNA, 20 bp, Artificial Sequence
  Synthetic
ggaaggacaccgtcatgacc

SEQ ID NO: 30823 - DNA, 20 bp, Artificial Sequence
  Synthetic
acggtgtccttccacaaata

SEQ ID NO: 30824 - DNA, 20 bp, Artificial Sequence
  Synthetic
gtaatttccgtatttgtgga

SEQ ID NO: 30825 - DNA, 20 bp, Artificial Sequence
  Synthetic
agaagtaatttccgtatttg

SEQ ID NO: 30826 - DNA, 20 bp, Artificial Sequence
  Synthetic
tacggaaattacttcttccc

SEQ ID NO: 30827 - DNA, 20 bp, Artificial Sequence
  Synthetic
aattacttcttccctggcac

SEQ ID NO: 30828 - DNA, 20 bp, Artificial Sequence
  Synthetic
ctattcccatacctgtgcca

SEQ ID NO: 30829 - DNA, 20 bp, Artificial Sequence
  Synthetic
cctattcccatacctgtgcc

SEQ ID NO: 30830 - DNA, 20 bp, Artificial Sequence
  Synthetic
acaggtgacatgtatgaagt

SEQ ID NO: 30831 - DNA, 20 bp, Artificial Sequence
  Synthetic
caggtgacatgtatgaagtc

SEQ ID NO: 30832 - DNA, 20 bp, Artificial Sequence
  Synthetic
aggtgacatgtatgaagtcg

SEQ ID NO: 30833 - DNA, 20 bp, Artificial Sequence
  Synthetic
tatgaagtcggggcagagag

SEQ ID NO: 30834 - DNA, 20 bp, Artificial Sequence
  Synthetic
gcacgttcagacagtagtag

SEQ ID NO: 30835 - DNA, 20 bp, Artificial Sequence
  Synthetic
actgtctgaacgtgcccctg

SEQ ID NO: 30836 - DNA, 20 bp, Artificial Sequence
  Synthetic
ctgtctgaacgtgcccctgc

SEQ ID NO: 30837 - DNA, 20 bp, Artificial Sequence
  Synthetic
ctgaacgtgcccctgcggga

SEQ ID NO: 30838 - DNA, 20 bp, Artificial Sequence
  Synthetic
tcatcaatgccatcccgcag

SEQ ID NO: 30839 - DNA, 20 bp, Artificial Sequence
  Synthetic
gtcatcaatgccatcccgca

SEQ ID NO: 30840 - DNA, 20 bp, Artificial Sequence
  Synthetic
ggtcatcaatgccatcccgc

SEQ ID NO: 30841 - DNA, 20 bp, Artificial Sequence
  Synthetic
tggaaaaggtgcttgtaacc

SEQ ID NO: 30842 - DNA, 20 bp, Artificial Sequence
  Synthetic
ttacaagcaccttttccagc

SEQ ID NO: 30843 - DNA, 20 bp, Artificial Sequence
  Synthetic
ggttgataaccggctggaaa

SEQ ID NO: 30844 - DNA, 20 bp, Artificial Sequence
  Synthetic
tttccagccggttatcaacc

SEQ ID NO: 30845 - DNA, 20 bp, Artificial Sequence
  Synthetic
ctacctggttgataaccggc

SEQ ID NO: 30846 - DNA, 20 bp, Artificial Sequence
  Synthetic
gccggttatcaaccaggtag

SEQ ID NO: 30847 - DNA, 20 bp, Artificial Sequence
  Synthetic
tccactacctggttgataac

SEQ ID NO: 30848 - DNA, 20 bp, Artificial Sequence
  Synthetic
gttggtagaagtccactacc

SEQ ID NO: 30849 - DNA, 20 bp, Artificial Sequence
  Synthetic
ggagcacaatgcacgtgggt

SEQ ID NO: 30850 - DNA, 20 bp, Artificial Sequence
  Synthetic
acccacgtgcattgtgctcc

SEQ ID NO: 30851 - DNA, 20 bp, Artificial Sequence
  Synthetic
acctggagcacaatgcacgt

SEQ ID NO: 30852 - DNA, 20 bp, Artificial Sequence
  Synthetic
tacctggagcacaatgcacg

SEQ ID NO: 30853 - DNA, 20 bp, Artificial Sequence
  Synthetic
gcagtgtggagctgactctc

SEQ ID NO: 30854 - DNA, 20 bp, Artificial Sequence
  Synthetic
cagtgtggagctgactctct

SEQ ID NO: 30855 - DNA, 20 bp, Artificial Sequence
  Synthetic
ctctctgggctgtgatcgat

SEQ ID NO: 30856 - DNA, 20 bp, Artificial Sequence
  Synthetic
tctctgggctgtgatcgatt

SEQ ID NO: 30857 - DNA, 20 bp, Artificial Sequence
  Synthetic
tgctttaacctcagcatccg

SEQ ID NO: 30858 - DNA, 20 bp, Artificial Sequence
  Synthetic
gctttaacctcagcatccga

SEQ ID NO: 30859 - DNA, 20 bp, Artificial Sequence
  Synthetic
aacctcagcatccgagggca

SEQ ID NO: 30860 - DNA, 20 bp, Artificial Sequence
  Synthetic
acctcagcatccgagggcat

SEQ ID NO: 30861 - DNA, 20 bp, Artificial Sequence
  Synthetic
acccatgccctcggatgctg

SEQ ID NO: 30862 - DNA, 20 bp, Artificial Sequence
  Synthetic
gcaagtctcacccatgccct

SEQ ID NO: 30863 - DNA, 20 bp, Artificial Sequence
  Synthetic
caatatccctctactcgtgc

SEQ ID NO: 30864 - DNA, 20 bp, Artificial Sequence
  Synthetic
aatatccctctactcgtgct

SEQ ID NO: 30865 - DNA, 20 bp, Artificial Sequence
  Synthetic
atccctctactcgtgctggg

SEQ ID NO: 30866 - DNA, 20 bp, Artificial Sequence
  Synthetic
caccacccagcacgagtaga

SEQ ID NO: 30867 - DNA, 20 bp, Artificial Sequence
  Synthetic
ccaccacccagcacgagtag

SEQ ID NO: 30868 - DNA, 20 bp, Artificial Sequence
  Synthetic
cctctactcgtgctgggtgg

SEQ ID NO: 30869 - DNA, 20 bp, Artificial Sequence
  Synthetic
ctactcgtgctgggtggtgg

SEQ ID NO: 30870 - DNA, 20 bp, Artificial Sequence
  Synthetic
tccgaaatgttgcccgctgc

SEQ ID NO: 30871 - DNA, 20 bp, Artificial Sequence
  Synthetic
accagcagcgggcaacattt

SEQ ID NO: 30872 - DNA, 20 bp, Artificial Sequence
  Synthetic
ggagagtgctcaccagcagc

SEQ ID NO: 30873 - DNA, 20 bp, Artificial Sequence
  Synthetic
aggagagtgctcaccagcag

SEQ ID NO: 30874 - DNA, 20 bp, Artificial Sequence
  Synthetic
gacatatgagacatcgctgc

SEQ ID NO: 30875 - DNA, 20 bp, Artificial Sequence
  Synthetic
ctgaagcaccagtgcacctg

SEQ ID NO: 30876 - DNA, 20 bp, Artificial Sequence
  Synthetic
tgaagcaccagtgcacctgc

SEQ ID NO: 30877 - DNA, 20 bp, Artificial Sequence
  Synthetic
tgctactcccgcaggtgcac

SEQ ID NO: 30878 - DNA, 20 bp, Artificial Sequence
  Synthetic
gtggctgctgctactcccgc

SEQ ID NO: 30879 - DNA, 20 bp, Artificial Sequence
  Synthetic
agcagccaccccgagcacgc

SEQ ID NO: 30880 - DNA, 20 bp, Artificial Sequence
  Synthetic
gcagccaccccgagcacgcc

SEQ ID NO: 30881 - DNA, 20 bp, Artificial Sequence
  Synthetic
gccaccccgagcacgccggg

SEQ ID NO: 30882 - DNA, 20 bp, Artificial Sequence
  Synthetic
tcctcccggcgtgctcgggg

SEQ ID NO: 30883 - DNA, 20 bp, Artificial Sequence
  Synthetic
ggatcctcccggcgtgctcg

SEQ ID NO: 30884 - DNA, 20 bp, Artificial Sequence
  Synthetic
tggatcctcccggcgtgctc

SEQ ID NO: 30885 - DNA, 20 bp, Artificial Sequence
  Synthetic
ctggatcctcccggcgtgct

SEQ ID NO: 30886 - DNA, 20 bp, Artificial Sequence
  Synthetic
ccagatgctctggatcctcc

SEQ ID NO: 30887 - DNA, 20 bp, Artificial Sequence
  Synthetic
ccgggaggatccagagcatc

SEQ ID NO: 30888 - DNA, 20 bp, Artificial Sequence
  Synthetic
gcaggcgggaccagatgctc

SEQ ID NO: 30889 - DNA, 20 bp, Artificial Sequence
  Synthetic
gagcatctggtcccgcctgc

SEQ ID NO: 30890 - DNA, 20 bp, Artificial Sequence
  Synthetic
ctggtcccgcctgcaggaga

SEQ ID NO: 30891 - DNA, 20 bp, Artificial Sequence
  Synthetic
tggtcccgcctgcaggagac

SEQ ID NO: 30892 - DNA, 20 bp, Artificial Sequence
  Synthetic
gaggcccgtctcctgcaggc

SEQ ID NO: 30893 - DNA, 20 bp, Artificial Sequence
  Synthetic
ggaggcccgtctcctgcagg

SEQ ID NO: 30894 - DNA, 20 bp, Artificial Sequence
  Synthetic
gcctgcaggagacgggcctc

SEQ ID NO: 30895 - DNA, 20 bp, Artificial Sequence
  Synthetic
cccggaggcccgtctcctgc

SEQ ID NO: 30896 - DNA, 20 bp, Artificial Sequence
  Synthetic
cctgcaggagacgggcctcc

SEQ ID NO: 30897 - DNA, 20 bp, Artificial Sequence
  Synthetic
ctgcaggagacgggcctccg

SEQ ID NO: 30898 - DNA, 20 bp, Artificial Sequence
  Synthetic
gggcctccggggcaaatgcg

SEQ ID NO: 30899 - DNA, 20 bp, Artificial Sequence
  Synthetic
ttacctcgcatttgccccgg

SEQ ID NO: 30900 - DNA, 20 bp, Artificial Sequence
  Synthetic
gcgttacctcgcatttgccc

SEQ ID NO: 30901 - DNA, 20 bp, Artificial Sequence
  Synthetic
ctgtccccacagtgcatccg

SEQ ID NO: 30902 - DNA, 20 bp, Artificial Sequence
  Synthetic
acagtgcatccgcggacgca

SEQ ID NO: 30903 - DNA, 20 bp, Artificial Sequence
  Synthetic
ccagggtggccttgcgtccg

SEQ ID NO: 30904 - DNA, 20 bp, Artificial Sequence
  Synthetic
ccgcggacgcaaggccaccc

SEQ ID NO: 30905 - DNA, 20 bp, Artificial Sequence
  Synthetic
cggacgcaaggccaccctgg

SEQ ID NO: 30906 - DNA, 20 bp, Artificial Sequence
  Synthetic
cgtctgtagctcctccaggg

SEQ ID NO: 30907 - DNA, 20 bp, Artificial Sequence
  Synthetic
caccctggaggagctacaga

SEQ ID NO: 30908 - DNA, 20 bp, Artificial Sequence
  Synthetic
caccgtctgtagctcctcca

SEQ ID NO: 30909 - DNA, 20 bp, Artificial Sequence
  Synthetic
gcaccgtctgtagctcctcc

SEQ ID NO: 30910 - DNA, 20 bp, Artificial Sequence
  Synthetic
ggagctacagacggtgcact

SEQ ID NO: 30911 - DNA, 20 bp, Artificial Sequence
  Synthetic
gaagcccacaccctcctgta

SEQ ID NO: 30912 - DNA, 20 bp, Artificial Sequence
  Synthetic
cgtgccatacaggagggtgt

SEQ ID NO: 30913 - DNA, 20 bp, Artificial Sequence
  Synthetic
tcgtgccatacaggagggtg

SEQ ID NO: 30914 - DNA, 20 bp, Artificial Sequence
  Synthetic
ggggttcgtgccatacagga

SEQ ID NO: 30915 - DNA, 20 bp, Artificial Sequence
  Synthetic
gggggttcgtgccatacagg

SEQ ID NO: 30916 - DNA, 20 bp, Artificial Sequence
  Synthetic
tgagggggttcgtgccatac

SEQ ID NO: 30917 - DNA, 20 bp, Artificial Sequence
  Synthetic
atggcacgaaccccctcaac

SEQ ID NO: 30918 - DNA, 20 bp, Artificial Sequence
  Synthetic
ccagtttctgccggttgagg

SEQ ID NO: 30919 - DNA, 20 bp, Artificial Sequence
  Synthetic
ccccctcaaccggcagaaac

SEQ ID NO: 30920 - DNA, 20 bp, Artificial Sequence
  Synthetic
tccagtttctgccggttgag

SEQ ID NO: 30921 - DNA, 20 bp, Artificial Sequence
  Synthetic
gtccagtttctgccggttga

SEQ ID NO: 30922 - DNA, 20 bp, Artificial Sequence
  Synthetic
tgtccagtttctgccggttg

SEQ ID NO: 30923 - DNA, 20 bp, Artificial Sequence
  Synthetic
tcttactgtccagtttctgc

SEQ ID NO: 30924 - DNA, 20 bp, Artificial Sequence
  Synthetic
ctggacagtaagaaacttct

SEQ ID NO: 30925 - DNA, 20 bp, Artificial Sequence
  Synthetic
cgctcgcctccgtgttcgtc

SEQ ID NO: 30926 - DNA, 20 bp, Artificial Sequence
  Synthetic
agggagccggacgaacacgg

SEQ ID NO: 30927 - DNA, 20 bp, Artificial Sequence
  Synthetic
gcaagggagccggacgaaca

SEQ ID NO: 30928 - DNA, 20 bp, Artificial Sequence
  Synthetic
gtgttcgtccggctcccttg

SEQ ID NO: 30929 - DNA, 20 bp, Artificial Sequence
  Synthetic
ttcgtccggctcccttgcgg

SEQ ID NO: 30930 - DNA, 20 bp, Artificial Sequence
  Synthetic
caacaccaccgcaagggagc

SEQ ID NO: 30931 - DNA, 20 bp, Artificial Sequence
  Synthetic
cggctcccttgcggtggtgt

SEQ ID NO: 30932 - DNA, 20 bp, Artificial Sequence
  Synthetic
ggctcccttgcggtggtgtt

SEQ ID NO: 30933 - DNA, 20 bp, Artificial Sequence
  Synthetic
gctcccttgcggtggtgttg

SEQ ID NO: 30934 - DNA, 20 bp, Artificial Sequence
  Synthetic
ttaccccaacaccaccgcaa

SEQ ID NO: 30935 - DNA, 20 bp, Artificial Sequence
  Synthetic
cttaccccaacaccaccgca

SEQ ID NO: 30936 - DNA, 20 bp, Artificial Sequence
  Synthetic
aggtggacagtgacaccata

SEQ ID NO: 30937 - DNA, 20 bp, Artificial Sequence
  Synthetic
cagtgacaccatatggaacg

SEQ ID NO: 30938 - DNA, 20 bp, Artificial Sequence
  Synthetic
cgagtgcacctcgttccata

SEQ ID NO: 30939 - DNA, 20 bp, Artificial Sequence
  Synthetic
catatggaacgaggtgcact

SEQ ID NO: 30940 - DNA, 20 bp, Artificial Sequence
  Synthetic
atggaacgaggtgcactcgg

SEQ ID NO: 30941 - DNA, 20 bp, Artificial Sequence
  Synthetic
tggaacgaggtgcactcggc

SEQ ID NO: 30942 - DNA, 20 bp, Artificial Sequence
  Synthetic
ggaacgaggtgcactcggcg

SEQ ID NO: 30943 - DNA, 20 bp, Artificial Sequence
  Synthetic
gaacgaggtgcactcggcgg

SEQ ID NO: 30944 - DNA, 20 bp, Artificial Sequence
  Synthetic
ctcggcgggggcagcccgcc

SEQ ID NO: 30945 - DNA, 20 bp, Artificial Sequence
  Synthetic
gggggcagcccgcctggctg

SEQ ID NO: 30946 - DNA, 20 bp, Artificial Sequence
  Synthetic
ggggcagcccgcctggctgt

SEQ ID NO: 30947 - DNA, 20 bp, Artificial Sequence
  Synthetic
cacgcagcccacagccaggc

SEQ ID NO: 30948 - DNA, 20 bp, Artificial Sequence
  Synthetic
ccacgcagcccacagccagg

SEQ ID NO: 30949 - DNA, 20 bp, Artificial Sequence
  Synthetic
ccgcctggctgtgggctgcg

SEQ ID NO: 30950 - DNA, 20 bp, Artificial Sequence
  Synthetic
ctaccacgcagcccacagcc

SEQ ID NO: 30951 - DNA, 20 bp, Artificial Sequence
  Synthetic
tgtgggctgcgtggtagagc

SEQ ID NO: 30952 - DNA, 20 bp, Artificial Sequence
  Synthetic
cgtggtagagctggtcttca

SEQ ID NO: 30953 - DNA, 20 bp, Artificial Sequence
  Synthetic
ggtagagctggtcttcaagg

SEQ ID NO: 30954 - DNA, 20 bp, Artificial Sequence
  Synthetic
ctggtcttcaaggtggccac

SEQ ID NO: 30955 - DNA, 20 bp, Artificial Sequence
  Synthetic
tggtcttcaaggtggccaca

SEQ ID NO: 30956 - DNA, 20 bp, Artificial Sequence
  Synthetic
ggtcttcaaggtggccacag

SEQ ID NO: 30957 - DNA, 20 bp, Artificial Sequence
  Synthetic
ggtggccacaggggagctga

SEQ ID NO: 30958 - DNA, 20 bp, Artificial Sequence
  Synthetic
actgaccttcagctcccctg

SEQ ID NO: 30959 - DNA, 20 bp, Artificial Sequence
  Synthetic
cctgcagaatggctttgctg

SEQ ID NO: 30960 - DNA, 20 bp, Artificial Sequence
  Synthetic
tttgctgtggtccgcccccc

SEQ ID NO: 30961 - DNA, 20 bp, Artificial Sequence
  Synthetic
ccgcatggtgtccagggggg

SEQ ID NO: 30962 - DNA, 20 bp, Artificial Sequence
  Synthetic
ccgcccccctggacaccatg

SEQ ID NO: 30963 - DNA, 20 bp, Artificial Sequence
  Synthetic
cctccgcatggtgtccaggg

SEQ ID NO: 30964 - DNA, 20 bp, Artificial Sequence
  Synthetic
cccccctggacaccatgcgg

SEQ ID NO: 30965 - DNA, 20 bp, Artificial Sequence
  Synthetic
tcctccgcatggtgtccagg

SEQ ID NO: 30966 - DNA, 20 bp, Artificial Sequence
  Synthetic
ctcctccgcatggtgtccag

SEQ ID NO: 30967 - DNA, 20 bp, Artificial Sequence
  Synthetic
tctcctccgcatggtgtcca

SEQ ID NO: 30968 - DNA, 20 bp, Artificial Sequence
  Synthetic
ctctcctccgcatggtgtcc

SEQ ID NO: 30969 - DNA, 20 bp, Artificial Sequence
  Synthetic
tgggcgtgctctcctccgca

SEQ ID NO: 30970 - DNA, 20 bp, Artificial Sequence
  Synthetic
cttttgctacttcaactccg

SEQ ID NO: 30971 - DNA, 20 bp, Artificial Sequence
  Synthetic
ctacttcaactccgtggccg

SEQ ID NO: 30972 - DNA, 20 bp, Artificial Sequence
  Synthetic
aagcttggctgccacggcca

SEQ ID NO: 30973 - DNA, 20 bp, Artificial Sequence
  Synthetic
ctgcagaagcttggctgcca

SEQ ID NO: 30974 - DNA, 20 bp, Artificial Sequence
  Synthetic
cagccaagcttctgcagcag

SEQ ID NO: 30975 - DNA, 20 bp, Artificial Sequence
  Synthetic
caacctctgctgcagaagct

SEQ ID NO: 30976 - DNA, 20 bp, Artificial Sequence
  Synthetic
cgtgagcaagatcctcatcg

SEQ ID NO: 30977 - DNA, 20 bp, Artificial Sequence
  Synthetic
gcaagatcctcatcgtggac

SEQ ID NO: 30978 - DNA, 20 bp, Artificial Sequence
  Synthetic
caagatcctcatcgtggact

SEQ ID NO: 30979 - DNA, 20 bp, Artificial Sequence
  Synthetic
tgcttacccagtccacgatg

SEQ ID NO: 30980 - DNA, 20 bp, Artificial Sequence
  Synthetic
ctctttaaggacgtgcacca

SEQ ID NO: 30981 - DNA, 20 bp, Artificial Sequence
  Synthetic
aaggacgtgcaccatggaaa

SEQ ID NO: 30982 - DNA, 20 bp, Artificial Sequence
  Synthetic
aggacgtgcaccatggaaac

SEQ ID NO: 30983 - DNA, 20 bp, Artificial Sequence
  Synthetic
cctgctgggtcccgtttcca

SEQ ID NO: 30984 - DNA, 20 bp, Artificial Sequence
  Synthetic
ccatggaaacgggacccagc

SEQ ID NO: 30985 - DNA, 20 bp, Artificial Sequence
  Synthetic
gtcgctgtagaaagcctgct

SEQ ID NO: 30986 - DNA, 20 bp, Artificial Sequence
  Synthetic
ggtcgctgtagaaagcctgc

SEQ ID NO: 30987 - DNA, 20 bp, Artificial Sequence
  Synthetic
gggacatgtacaggacgctg

SEQ ID NO: 30988 - DNA, 20 bp, Artificial Sequence
  Synthetic
agggacatgtacaggacgct

SEQ ID NO: 30989 - DNA, 20 bp, Artificial Sequence
  Synthetic
gagggacatgtacaggacgc

SEQ ID NO: 30990 - DNA, 20 bp, Artificial Sequence
  Synthetic
agcggtggagggacatgtac

SEQ ID NO: 30991 - DNA, 20 bp, Artificial Sequence
  Synthetic
tccctccaccgctacgacga

SEQ ID NO: 30992 - DNA, 20 bp, Artificial Sequence
  Synthetic
cccatcgtcgtagcggtgga

SEQ ID NO: 30993 - DNA, 20 bp, Artificial Sequence
  Synthetic
ccctccaccgctacgacgat

SEQ ID NO: 30994 - DNA, 20 bp, Artificial Sequence
  Synthetic
tcccatcgtcgtagcggtgg

SEQ ID NO: 30995 - DNA, 20 bp, Artificial Sequence
  Synthetic
agttcccatcgtcgtagcgg

SEQ ID NO: 30996 - DNA, 20 bp, Artificial Sequence
  Synthetic
agaagttcccatcgtcgtag

SEQ ID NO: 30997 - DNA, 20 bp, Artificial Sequence
  Synthetic
gacgatgggaacttcttccc

SEQ ID NO: 30998 - DNA, 20 bp, Artificial Sequence
  Synthetic
gggaacttcttcccaggcag

SEQ ID NO: 30999 - DNA, 20 bp, Artificial Sequence
  Synthetic
ggaacttcttcccaggcagc

SEQ ID NO: 31000 - DNA, 20 bp, Artificial Sequence
  Synthetic
gaacttcttcccaggcagcg

SEQ ID NO: 31001 - DNA, 20 bp, Artificial Sequence
  Synthetic
catcaggagccccgctgcct

SEQ ID NO: 31002 - DNA, 20 bp, Artificial Sequence
  Synthetic
tcatcaggagccccgctgcc

SEQ ID NO: 31003 - DNA, 20 bp, Artificial Sequence
  Synthetic
aggcagcggggctcctgatg

SEQ ID NO: 31004 - DNA, 20 bp, Artificial Sequence
  Synthetic
agcggggctcctgatgaggt

SEQ ID NO: 31005 - DNA, 20 bp, Artificial Sequence
  Synthetic
tataccccacctacctcatc

SEQ ID NO: 31006 - DNA, 20 bp, Artificial Sequence
  Synthetic
ttctggccacaggtgggcac

SEQ ID NO: 31007 - DNA, 20 bp, Artificial Sequence
  Synthetic
tctggccacaggtgggcaca

SEQ ID NO: 31008 - DNA, 20 bp, Artificial Sequence
  Synthetic
ccacaggtgggcacagggcc

SEQ ID NO: 31009 - DNA, 20 bp, Artificial Sequence
  Synthetic
ggtgggcacagggcccggcg

SEQ ID NO: 31010 - DNA, 20 bp, Artificial Sequence
  Synthetic
gtgggcacagggcccggcgt

SEQ ID NO: 31011 - DNA, 20 bp, Artificial Sequence
  Synthetic
ttgacgttgaaacccacgcc

SEQ ID NO: 31012 - DNA, 20 bp, Artificial Sequence
  Synthetic
gttgacgttgaaacccacgc

SEQ ID NO: 31013 - DNA, 20 bp, Artificial Sequence
  Synthetic
cgtgggtttcaacgtcaaca

SEQ ID NO: 31014 - DNA, 20 bp, Artificial Sequence
  Synthetic
aacgtcaacatggctttcac

SEQ ID NO: 31015 - DNA, 20 bp, Artificial Sequence
  Synthetic
gtcaacatggctttcaccgg

SEQ ID NO: 31016 - DNA, 20 bp, Artificial Sequence
  Synthetic
catggctttcaccggcggcc

SEQ ID NO: 31017 - DNA, 20 bp, Artificial Sequence
  Synthetic
catgggggggtccaggccgc

SEQ ID NO: 31018 - DNA, 20 bp, Artificial Sequence
  Synthetic
cggcggcctggaccccccca

SEQ ID NO: 31019 - DNA, 20 bp, Artificial Sequence
  Synthetic
ggcggcctggacccccccat

SEQ ID NO: 31020 - DNA, 20 bp, Artificial Sequence
  Synthetic
cgtctcccatgggggggtcc

SEQ ID NO: 31021 - DNA, 20 bp, Artificial Sequence
  Synthetic
actcagcgtctcccatgggg

SEQ ID NO: 31022 - DNA, 20 bp, Artificial Sequence
  Synthetic
tactcagcgtctcccatggg

SEQ ID NO: 31023 - DNA, 20 bp, Artificial Sequence
  Synthetic
gtactcagcgtctcccatgg

SEQ ID NO: 31024 - DNA, 20 bp, Artificial Sequence
  Synthetic
agtactcagcgtctcccatg

SEQ ID NO: 31025 - DNA, 20 bp, Artificial Sequence
  Synthetic
aagtactcagcgtctcccat

SEQ ID NO: 31026 - DNA, 20 bp, Artificial Sequence
  Synthetic
caagtactcagcgtctccca

SEQ ID NO: 31027 - DNA, 20 bp, Artificial Sequence
  Synthetic
catgggagacgctgagtact

SEQ ID NO: 31028 - DNA, 20 bp, Artificial Sequence
  Synthetic
gggagacgctgagtacttgg

SEQ ID NO: 31029 - DNA, 20 bp, Artificial Sequence
  Synthetic
ctgagtacttggcggccttc

SEQ ID NO: 31030 - DNA, 20 bp, Artificial Sequence
  Synthetic
aagccgggaggctcacctga

SEQ ID NO: 31031 - DNA, 20 bp, Artificial Sequence
  Synthetic
tcctgtcctttgcagaacgg

SEQ ID NO: 31032 - DNA, 20 bp, Artificial Sequence
  Synthetic
ggggcaaactcgctggcgat

SEQ ID NO: 31033 - DNA, 20 bp, Artificial Sequence
  Synthetic
gatcgccagcgagtttgccc

SEQ ID NO: 31034 - DNA, 20 bp, Artificial Sequence
  Synthetic
cacatccggggcaaactcgc

SEQ ID NO: 31035 - DNA, 20 bp, Artificial Sequence
  Synthetic
cagcgagtttgccccggatg

SEQ ID NO: 31036 - DNA, 20 bp, Artificial Sequence
  Synthetic
gtttgccccggatgtggtgc

SEQ ID NO: 31037 - DNA, 20 bp, Artificial Sequence
  Synthetic
tgacaccagcaccacatccg

SEQ ID NO: 31038 - DNA, 20 bp, Artificial Sequence
  Synthetic
atgacaccagcaccacatcc

SEQ ID NO: 31039 - DNA, 20 bp, Artificial Sequence
  Synthetic
gatgacaccagcaccacatc

SEQ ID NO: 31040 - DNA, 20 bp, Artificial Sequence
  Synthetic
gatgtggtgctggtgtcatc

SEQ ID NO: 31041 - DNA, 20 bp, Artificial Sequence
  Synthetic
gtcatcaggcttcgatgccg

SEQ ID NO: 31042 - DNA, 20 bp, Artificial Sequence
  Synthetic
atcaggcttcgatgccgtgg

SEQ ID NO: 31043 - DNA, 20 bp, Artificial Sequence
  Synthetic
tcaggcttcgatgccgtgga

SEQ ID NO: 31044 - DNA, 20 bp, Artificial Sequence
  Synthetic
aggggtggggtggccctcca

SEQ ID NO: 31045 - DNA, 20 bp, Artificial Sequence
  Synthetic
gagggccaccccacccctct

SEQ ID NO: 31046 - DNA, 20 bp, Artificial Sequence
  Synthetic
agggccaccccacccctctt

SEQ ID NO: 31047 - DNA, 20 bp, Artificial Sequence
  Synthetic
gggccaccccacccctcttg

SEQ ID NO: 31048 - DNA, 20 bp, Artificial Sequence
  Synthetic
ggccaccccacccctcttgg

SEQ ID NO: 31049 - DNA, 20 bp, Artificial Sequence
  Synthetic
agcccccaagaggggtgggg

SEQ ID NO: 31050 - DNA, 20 bp, Artificial Sequence
  Synthetic
tgtagcccccaagaggggtg

SEQ ID NO: 31051 - DNA, 20 bp, Artificial Sequence
  Synthetic
ttgtagcccccaagaggggt

SEQ ID NO: 31052 - DNA, 20 bp, Artificial Sequence
  Synthetic
gttgtagcccccaagagggg

SEQ ID NO: 31053 - DNA, 20 bp, Artificial Sequence
  Synthetic
gaggttgtagcccccaagag

SEQ ID NO: 31054 - DNA, 20 bp, Artificial Sequence
  Synthetic
agaggttgtagcccccaaga

SEQ ID NO: 31055 - DNA, 20 bp, Artificial Sequence
  Synthetic
gagaggttgtagcccccaag

SEQ ID NO: 31056 - DNA, 20 bp, Artificial Sequence
  Synthetic
accacttacatctggcggag

SEQ ID NO: 31057 - DNA, 20 bp, Artificial Sequence
  Synthetic
gcagaaccacttacatctgg

SEQ ID NO: 31058 - DNA, 20 bp, Artificial Sequence
  Synthetic
tatgcagaaccacttacatc

SEQ ID NO: 31059 - DNA, 20 bp, Artificial Sequence
  Synthetic
ccgtttcccgttgcaggctt

SEQ ID NO: 31060 - DNA, 20 bp, Artificial Sequence
  Synthetic
cgtttcccgttgcaggcttc

SEQ ID NO: 31061 - DNA, 20 bp, Artificial Sequence
  Synthetic
gtacctgacgaagcagctga

SEQ ID NO: 31062 - DNA, 20 bp, Artificial Sequence
  Synthetic
tacctgacgaagcagctgat

SEQ ID NO: 31063 - DNA, 20 bp, Artificial Sequence
  Synthetic
ggcccatcagctgcttcgtc

SEQ ID NO: 31064 - DNA, 20 bp, Artificial Sequence
  Synthetic
gacgaagcagctgatgggcc

SEQ ID NO: 31065 - DNA, 20 bp, Artificial Sequence
  Synthetic
aagcagctgatgggcctggc

SEQ ID NO: 31066 - DNA, 20 bp, Artificial Sequence
  Synthetic
cagctgatgggcctggctgg

SEQ ID NO: 31067 - DNA, 20 bp, Artificial Sequence
  Synthetic
tgatgggcctggctggcggc

SEQ ID NO: 31068 - DNA, 20 bp, Artificial Sequence
  Synthetic
ggacaatccggccgccagcc

SEQ ID NO: 31069 - DNA, 20 bp, Artificial Sequence
  Synthetic
ggctggcggccggattgtcc

SEQ ID NO: 31070 - DNA, 20 bp, Artificial Sequence
  Synthetic
cctcgagggccaggacaatc

SEQ ID NO: 31071 - DNA, 20 bp, Artificial Sequence
  Synthetic
ccggattgtcctggccctcg

SEQ ID NO: 31072 - DNA, 20 bp, Artificial Sequence
  Synthetic
cggattgtcctggccctcga

SEQ ID NO: 31073 - DNA, 20 bp, Artificial Sequence
  Synthetic
attgtcctggccctcgaggg

SEQ ID NO: 31074 - DNA, 20 bp, Artificial Sequence
  Synthetic
cgtggcctccctcgagggcc

SEQ ID NO: 31075 - DNA, 20 bp, Artificial Sequence
  Synthetic
caggtcgtggcctccctcga

SEQ ID NO: 31076 - DNA, 20 bp, Artificial Sequence
  Synthetic
tcaggtcgtggcctccctcg

SEQ ID NO: 31077 - DNA, 20 bp, Artificial Sequence
  Synthetic
cgcaaatggcggtcaggtcg

SEQ ID NO: 31078 - DNA, 20 bp, Artificial Sequence
  Synthetic
aggcgtcgcaaatggcggtc

SEQ ID NO: 31079 - DNA, 20 bp, Artificial Sequence
  Synthetic
gaccgccatttgcgacgcct

SEQ ID NO: 31080 - DNA, 20 bp, Artificial Sequence
  Synthetic
ttccgaggcgtcgcaaatgg

SEQ ID NO: 31081 - DNA, 20 bp, Artificial Sequence
  Synthetic
tgcttccgaggcgtcgcaaa

SEQ ID NO: 31082 - DNA, 20 bp, Artificial Sequence
  Synthetic
ggcagaaacacatgcttccg

SEQ ID NO: 31083 - DNA, 20 bp, Artificial Sequence
  Synthetic
agcatgtgtttctgccttgc

SEQ ID NO: 31084 - DNA, 20 bp, Artificial Sequence
  Synthetic
gcatgtgtttctgccttgct

SEQ ID NO: 31085 - DNA, 20 bp, Artificial Sequence
  Synthetic
ctcactgcctgtggcagagc

SEQ ID NO: 31086 - DNA, 20 bp, Artificial Sequence
  Synthetic
cgcagggccggctctgccac

SEQ ID NO: 31087 - DNA, 20 bp, Artificial Sequence
  Synthetic
ctgtggcagagccggccctg

SEQ ID NO: 31088 - DNA, 20 bp, Artificial Sequence
  Synthetic
tgtggcagagccggccctgc

SEQ ID NO: 31089 - DNA, 20 bp, Artificial Sequence
  Synthetic
agctgctgctcccgcagggc

SEQ ID NO: 31090 - DNA, 20 bp, Artificial Sequence
  Synthetic
ctgcagctgctgctcccgca

SEQ ID NO: 31091 - DNA, 20 bp, Artificial Sequence
  Synthetic
gctgcagctgctgctcccgc

SEQ ID NO: 31092 - DNA, 20 bp, Artificial Sequence
  Synthetic
gcgggagcagcagctgcagc

SEQ ID NO: 31093 - DNA, 20 bp, Artificial Sequence
  Synthetic
gcagctgcagcaggagctcc

SEQ ID NO: 31094 - DNA, 20 bp, Artificial Sequence
  Synthetic
gctgcttctgcttgagcgcc

SEQ ID NO: 31095 - DNA, 20 bp, Artificial Sequence
  Synthetic
agcagaagcagcagatccag

SEQ ID NO: 31096 - DNA, 20 bp, Artificial Sequence
  Synthetic
cagcgatgaggatctgcctc

SEQ ID NO: 31097 - DNA, 20 bp, Artificial Sequence
  Synthetic
tcctcatcgctgagttccag

SEQ ID NO: 31098 - DNA, 20 bp, Artificial Sequence
  Synthetic
gcctctggaactcagcgatg

SEQ ID NO: 31099 - DNA, 20 bp, Artificial Sequence
  Synthetic
agagctgctcgtgctgcctc

SEQ ID NO: 31100 - DNA, 20 bp, Artificial Sequence
  Synthetic
ggcagcacgagcagctctcc

SEQ ID NO: 31101 - DNA, 20 bp, Artificial Sequence
  Synthetic
gcagctctcccggcagcacg

SEQ ID NO: 31102 - DNA, 20 bp, Artificial Sequence
  Synthetic
gagctgcgcctcgtgctgcc

SEQ ID NO: 31103 - DNA, 20 bp, Artificial Sequence
  Synthetic
ggagctgcgcctcgtgctgc

SEQ ID NO: 31104 - DNA, 20 bp, Artificial Sequence
  Synthetic
gcagctccacgagcacatca

SEQ ID NO: 31105 - DNA, 20 bp, Artificial Sequence
  Synthetic
gcctcaccttgatgtgctcg

SEQ ID NO: 31106 - DNA, 20 bp, Artificial Sequence
  Synthetic
cttccacttgcagcaacaac

SEQ ID NO: 31107 - DNA, 20 bp, Artificial Sequence
  Synthetic
gcagcaacaacaggagatgc

SEQ ID NO: 31108 - DNA, 20 bp, Artificial Sequence
  Synthetic
gctggccatgaagcaccagc

SEQ ID NO: 31109 - DNA, 20 bp, Artificial Sequence
  Synthetic
cagctcctgctggtgcttca

SEQ ID NO: 31110 - DNA, 20 bp, Artificial Sequence
  Synthetic
gaagcaccagcaggagctgc

SEQ ID NO: 31111 - DNA, 20 bp, Artificial Sequence
  Synthetic
ggtgttccagcagctcctgc

SEQ ID NO: 31112 - DNA, 20 bp, Artificial Sequence
  Synthetic
aggagctgctggaacaccag

SEQ ID NO: 31113 - DNA, 20 bp, Artificial Sequence
  Synthetic
gctggaacaccagcggaagc

SEQ ID NO: 31114 - DNA, 20 bp, Artificial Sequence
  Synthetic
aacaccagcggaagctggag

SEQ ID NO: 31115 - DNA, 20 bp, Artificial Sequence
  Synthetic
ggtgcctctccagcttccgc

SEQ ID NO: 31116 - DNA, 20 bp, Artificial Sequence
  Synthetic
gaagctggagaggcaccgcc

SEQ ID NO: 31117 - DNA, 20 bp, Artificial Sequence
  Synthetic
ggagaggcaccgccaggagc

SEQ ID NO: 31118 - DNA, 20 bp, Artificial Sequence
  Synthetic
gcaccgccaggagcaggagc

SEQ ID NO: 31119 - DNA, 20 bp, Artificial Sequence
  Synthetic
tctccagctcctgctcctgg

SEQ ID NO: 31120 - DNA, 20 bp, Artificial Sequence
  Synthetic
gcttctccagctcctgctcc

SEQ ID NO: 31121 - DNA, 20 bp, Artificial Sequence
  Synthetic
aggagctggagaagcagcac

SEQ ID NO: 31122 - DNA, 20 bp, Artificial Sequence
  Synthetic
ggagctggagaagcagcacc

SEQ ID NO: 31123 - DNA, 20 bp, Artificial Sequence
  Synthetic
gctgctgcagcttctgctcc

SEQ ID NO: 31124 - DNA, 20 bp, Artificial Sequence
  Synthetic
cacgtgcaccctgagcatgc

SEQ ID NO: 31125 - DNA, 20 bp, Artificial Sequence
  Synthetic
tgcaccctgagcatgctggc

SEQ ID NO: 31126 - DNA, 20 bp, Artificial Sequence
  Synthetic
ggatccggccagcatgctca

SEQ ID NO: 31127 - DNA, 20 bp, Artificial Sequence
  Synthetic
tggatccggccagcatgctc

SEQ ID NO: 31128 - DNA, 20 bp, Artificial Sequence
  Synthetic
ctggccggatccagagcatc

SEQ ID NO: 31129 - DNA, 20 bp, Artificial Sequence
  Synthetic
gggaccagatgctctggatc

SEQ ID NO: 31130 - DNA, 20 bp, Artificial Sequence
  Synthetic
ggatccagagcatctggtcc

SEQ ID NO: 31131 - DNA, 20 bp, Artificial Sequence
  Synthetic
gcagccgggaccagatgctc

SEQ ID NO: 31132 - DNA, 20 bp, Artificial Sequence
  Synthetic
gagcatctggtcccggctgc

SEQ ID NO: 31133 - DNA, 20 bp, Artificial Sequence
  Synthetic
tggtcccggctgcaggagac

SEQ ID NO: 31134 - DNA, 20 bp, Artificial Sequence
  Synthetic
caggcctgtctcctgcagcc

SEQ ID NO: 31135 - DNA, 20 bp, Artificial Sequence
  Synthetic
gcaggcctgtctcctgcagc

SEQ ID NO: 31136 - DNA, 20 bp, Artificial Sequence
  Synthetic
aggcctgcttagcaagtgcg

SEQ ID NO: 31137 - DNA, 20 bp, Artificial Sequence
  Synthetic
ttacctcgcacttgctaagc

SEQ ID NO: 31138 - DNA, 20 bp, Artificial Sequence
  Synthetic
tcctcctggcagcggatccg

SEQ ID NO: 31139 - DNA, 20 bp, Artificial Sequence
  Synthetic
ctagcgtggctttgcgacct

SEQ ID NO: 31140 - DNA, 20 bp, Artificial Sequence
  Synthetic
tgtctggatctcatctagcg

SEQ ID NO: 31141 - DNA, 20 bp, Artificial Sequence
  Synthetic
ggtattcagagtgcactgtc

SEQ ID NO: 31142 - DNA, 20 bp, Artificial Sequence
  Synthetic
gaataccacaccctgctcta

SEQ ID NO: 31143 - DNA, 20 bp, Artificial Sequence
  Synthetic
aataccacaccctgctctat

SEQ ID NO: 31144 - DNA, 20 bp, Artificial Sequence
  Synthetic
tggtcccatagagcagggtg

SEQ ID NO: 31145 - DNA, 20 bp, Artificial Sequence
  Synthetic
gggactggtcccatagagca

SEQ ID NO: 31146 - DNA, 20 bp, Artificial Sequence
  Synthetic
ggggactggtcccatagagc

SEQ ID NO: 31147 - DNA, 20 bp, Artificial Sequence
  Synthetic
atgggaccagtcccctcaac

SEQ ID NO: 31148 - DNA, 20 bp, Artificial Sequence
  Synthetic
cttctgccggttgaggggac

SEQ ID NO: 31149 - DNA, 20 bp, Artificial Sequence
  Synthetic
tctagcttctgccggttgag

SEQ ID NO: 31150 - DNA, 20 bp, Artificial Sequence
  Synthetic
gtctagcttctgccggttga

SEQ ID NO: 31151 - DNA, 20 bp, Artificial Sequence
  Synthetic
tgtctagcttctgccggttg

SEQ ID NO: 31152 - DNA, 20 bp, Artificial Sequence
  Synthetic
tcttgctgtctagcttctgc

SEQ ID NO: 31153 - DNA, 20 bp, Artificial Sequence
  Synthetic
ctagacagcaagaagttgct

SEQ ID NO: 31154 - DNA, 20 bp, Artificial Sequence
  Synthetic
catacatcttctggctgatg

SEQ ID NO: 31155 - DNA, 20 bp, Artificial Sequence
  Synthetic
gcatacatcttctggctgat

SEQ ID NO: 31156 - DNA, 20 bp, Artificial Sequence
  Synthetic
agcatacatcttctggctga

SEQ ID NO: 31157 - DNA, 20 bp, Artificial Sequence
  Synthetic
gcagcacagcatacatcttc

SEQ ID NO: 31158 - DNA, 20 bp, Artificial Sequence
  Synthetic
atgtatgctgtgctgccttg

SEQ ID NO: 31159 - DNA, 20 bp, Artificial Sequence
  Synthetic
tgtatgctgtgctgccttgt

SEQ ID NO: 31160 - DNA, 20 bp, Artificial Sequence
  Synthetic
gtatgctgtgctgccttgtg

SEQ ID NO: 31161 - DNA, 20 bp, Artificial Sequence
  Synthetic
tatgctgtgctgccttgtgg

SEQ ID NO: 31162 - DNA, 20 bp, Artificial Sequence
  Synthetic
gtgctgccttgtgggggcat

SEQ ID NO: 31163 - DNA, 20 bp, Artificial Sequence
  Synthetic
tgctgccttgtgggggcatc

SEQ ID NO: 31164 - DNA, 20 bp, Artificial Sequence
  Synthetic
gctgccttgtgggggcatcg

SEQ ID NO: 31165 - DNA, 20 bp, Artificial Sequence
  Synthetic
ctcaccccgatgcccccaca

SEQ ID NO: 31166 - DNA, 20 bp, Artificial Sequence
  Synthetic
aggtggacagtgacaccgtg

SEQ ID NO: 31167 - DNA, 20 bp, Artificial Sequence
  Synthetic
ggagtgcatctcattccaca

SEQ ID NO: 31168 - DNA, 20 bp, Artificial Sequence
  Synthetic
ctcctccagtgctgtgcgca

SEQ ID NO: 31169 - DNA, 20 bp, Artificial Sequence
  Synthetic
tgccatgcgcacagcactgg

SEQ ID NO: 31170 - DNA, 20 bp, Artificial Sequence
  Synthetic
cactgccatgcgcacagcac

SEQ ID NO: 31171 - DNA, 20 bp, Artificial Sequence
  Synthetic
cagtgctgtgcgcatggcag

SEQ ID NO: 31172 - DNA, 20 bp, Artificial Sequence
  Synthetic
agtgctgtgcgcatggcagt

SEQ ID NO: 31173 - DNA, 20 bp, Artificial Sequence
  Synthetic
catggcagtgggctgcctgc

SEQ ID NO: 31174 - DNA, 20 bp, Artificial Sequence
  Synthetic
agtgggctgcctgctggagc

SEQ ID NO: 31175 - DNA, 20 bp, Artificial Sequence
  Synthetic
ccttgaaggccagctccagc

SEQ ID NO: 31176 - DNA, 20 bp, Artificial Sequence
  Synthetic
cctgctggagctggccttca

SEQ ID NO: 31177 - DNA, 20 bp, Artificial Sequence
  Synthetic
gctggagctggccttcaagg

SEQ ID NO: 31178 - DNA, 20 bp, Artificial Sequence
  Synthetic
ctggccttcaaggtggctgc

SEQ ID NO: 31179 - DNA, 20 bp, Artificial Sequence
  Synthetic
ctctcctgcagccaccttga

SEQ ID NO: 31180 - DNA, 20 bp, Artificial Sequence
  Synthetic
ggtggctgcaggagagctca

SEQ ID NO: 31181 - DNA, 20 bp, Artificial Sequence
  Synthetic
agaatggatttgccatcatc

SEQ ID NO: 31182 - DNA, 20 bp, Artificial Sequence
  Synthetic
tttgccatcatccggccccc

SEQ ID NO: 31183 - DNA, 20 bp, Artificial Sequence
  Synthetic
gtgtcctgggggccggatga

SEQ ID NO: 31184 - DNA, 20 bp, Artificial Sequence
  Synthetic
cggcgtggtgtcctgggggc

SEQ ID NO: 31185 - DNA, 20 bp, Artificial Sequence
  Synthetic
gcccccaggacaccacgccg

SEQ ID NO: 31186 - DNA, 20 bp, Artificial Sequence
  Synthetic
tcctcggcgtggtgtcctgg

SEQ ID NO: 31187 - DNA, 20 bp, Artificial Sequence
  Synthetic
ttcctcggcgtggtgtcctg

SEQ ID NO: 31188 - DNA, 20 bp, Artificial Sequence
  Synthetic
attcctcggcgtggtgtcct

SEQ ID NO: 31189 - DNA, 20 bp, Artificial Sequence
  Synthetic
gattcctcggcgtggtgtcc

SEQ ID NO: 31190 - DNA, 20 bp, Artificial Sequence
  Synthetic
tggctgtggattcctcggcg

SEQ ID NO: 31191 - DNA, 20 bp, Artificial Sequence
  Synthetic
tcacatggctgtggattcct

SEQ ID NO: 31192 - DNA, 20 bp, Artificial Sequence
  Synthetic
ctagggcactcacatggctg

SEQ ID NO: 31193 - DNA, 20 bp, Artificial Sequence
  Synthetic
ctgtaggagttttgcggtga

SEQ ID NO: 31194 - DNA, 20 bp, Artificial Sequence
  Synthetic
cttctgctgtaggagttttg

SEQ ID NO: 31195 - DNA, 20 bp, Artificial Sequence
  Synthetic
ccacgttcaacttctgctgt

SEQ ID NO: 31196 - DNA, 20 bp, Artificial Sequence
  Synthetic
cctacagcagaagttgaacg

SEQ ID NO: 31197 - DNA, 20 bp, Artificial Sequence
  Synthetic
ctacagcagaagttgaacgt

SEQ ID NO: 31198 - DNA, 20 bp, Artificial Sequence
  Synthetic
gcagaagttgaacgtgggca

SEQ ID NO: 31199 - DNA, 20 bp, Artificial Sequence
  Synthetic
cgtgggcaaggtcctcatcg

SEQ ID NO: 31200 - DNA, 20 bp, Artificial Sequence
  Synthetic
gcaaggtcctcatcgtggac

SEQ ID NO: 31201 - DNA, 20 bp, Artificial Sequence
  Synthetic
caaggtcctcatcgtggact

SEQ ID NO: 31202 - DNA, 20 bp, Artificial Sequence
  Synthetic
gtcctcatcgtggactgggt

SEQ ID NO: 31203 - DNA, 20 bp, Artificial Sequence
  Synthetic
tgcctacccagtccacgatg

SEQ ID NO: 31204 - DNA, 20 bp, Artificial Sequence
  Synthetic
ccctcataggacattcacca

SEQ ID NO: 31205 - DNA, 20 bp, Artificial Sequence
  Synthetic
taggacattcaccatggcaa

SEQ ID NO: 31206 - DNA, 20 bp, Artificial Sequence
  Synthetic
cctgctgggtgccattgcca

SEQ ID NO: 31207 - DNA, 20 bp, Artificial Sequence
  Synthetic
ccatggcaatggcacccagc

SEQ ID NO: 31208 - DNA, 20 bp, Artificial Sequence
  Synthetic
gtcattgtagaacgcctgct

SEQ ID NO: 31209 - DNA, 20 bp, Artificial Sequence
  Synthetic
ggtcattgtagaacgcctgc

SEQ ID NO: 31210 - DNA, 20 bp, Artificial Sequence
  Synthetic
gagagatgtagagcacagag

SEQ ID NO: 31211 - DNA, 20 bp, Artificial Sequence
  Synthetic
agagagatgtagagcacaga

SEQ ID NO: 31212 - DNA, 20 bp, Artificial Sequence
  Synthetic
cagagagatgtagagcacag

SEQ ID NO: 31213 - DNA, 20 bp, Artificial Sequence
  Synthetic
tctctgcatcgctatgacaa

SEQ ID NO: 31214 - DNA, 20 bp, Artificial Sequence
  Synthetic
ctctgcatcgctatgacaac

SEQ ID NO: 31215 - DNA, 20 bp, Artificial Sequence
  Synthetic
gacaacgggaacttctttcc

SEQ ID NO: 31216 - DNA, 20 bp, Artificial Sequence
  Synthetic
gggaacttctttccaggctc

SEQ ID NO: 31217 - DNA, 20 bp, Artificial Sequence
  Synthetic
ggaacttctttccaggctct

SEQ ID NO: 31218 - DNA, 20 bp, Artificial Sequence
  Synthetic
gaacttctttccaggctctg

SEQ ID NO: 31219 - DNA, 20 bp, Artificial Sequence
  Synthetic
tcttcaggagccccagagcc

SEQ ID NO: 31220 - DNA, 20 bp, Artificial Sequence
  Synthetic
aggctctggggctcctgaag

SEQ ID NO: 31221 - DNA, 20 bp, Artificial Sequence
  Synthetic
cccaggagctgtacctcttc

SEQ ID NO: 31222 - DNA, 20 bp, Artificial Sequence
  Synthetic
caactctggtgccaggttgg

SEQ ID NO: 31223 - DNA, 20 bp, Artificial Sequence
  Synthetic
ctctggtgccaggttggtgg

SEQ ID NO: 31224 - DNA, 20 bp, Artificial Sequence
  Synthetic
tgccaggttggtggaggacc

SEQ ID NO: 31225 - DNA, 20 bp, Artificial Sequence
  Synthetic
cgcctggtcctccaccaacc

SEQ ID NO: 31226 - DNA, 20 bp, Artificial Sequence
  Synthetic
ggttggtggaggaccaggcg

SEQ ID NO: 31227 - DNA, 20 bp, Artificial Sequence
  Synthetic
gttggtggaggaccaggcgt

SEQ ID NO: 31228 - DNA, 20 bp, Artificial Sequence
  Synthetic
ttggtggaggaccaggcgtg

SEQ ID NO: 31229 - DNA, 20 bp, Artificial Sequence
  Synthetic
ttcacattgtaccccacgcc

SEQ ID NO: 31230 - DNA, 20 bp, Artificial Sequence
  Synthetic
cgtggggtacaatgtgaacg

SEQ ID NO: 31231 - DNA, 20 bp, Artificial Sequence
  Synthetic
ggtacaatgtgaacgtggca

SEQ ID NO: 31232 - DNA, 20 bp, Artificial Sequence
  Synthetic
aatgtgaacgtggcatggac

SEQ ID NO: 31233 - DNA, 20 bp, Artificial Sequence
  Synthetic
gtgaacgtggcatggacagg

SEQ ID NO: 31234 - DNA, 20 bp, Artificial Sequence
  Synthetic
cgtggcatggacaggaggtg

SEQ ID NO: 31235 - DNA, 20 bp, Artificial Sequence
  Synthetic
ggaggtgtggacccccccat

SEQ ID NO: 31236 - DNA, 20 bp, Artificial Sequence
  Synthetic
ggacccccccattggagacg

SEQ ID NO: 31237 - DNA, 20 bp, Artificial Sequence
  Synthetic
actccacgtctccaatgggg

SEQ ID NO: 31238 - DNA, 20 bp, Artificial Sequence
  Synthetic
tactccacgtctccaatggg

SEQ ID NO: 31239 - DNA, 20 bp, Artificial Sequence
  Synthetic
gtactccacgtctccaatgg

SEQ ID NO: 31240 - DNA, 20 bp, Artificial Sequence
  Synthetic
ggtactccacgtctccaatg

SEQ ID NO: 31241 - DNA, 20 bp, Artificial Sequence
  Synthetic
aggtactccacgtctccaat

SEQ ID NO: 31242 - DNA, 20 bp, Artificial Sequence
  Synthetic
aaggtactccacgtctccaa

SEQ ID NO: 31243 - DNA, 20 bp, Artificial Sequence
  Synthetic
tggagtaccttacagccttc

SEQ ID NO: 31244 - DNA, 20 bp, Artificial Sequence
  Synthetic
gtaccttacagccttcaggt

SEQ ID NO: 31245 - DNA, 20 bp, Artificial Sequence
  Synthetic
gtccctacctgaaggctgta

SEQ ID NO: 31246 - DNA, 20 bp, Artificial Sequence
  Synthetic
ccttttcagtccctacctga

SEQ ID NO: 31247 - DNA, 20 bp, Artificial Sequence
  Synthetic
gccatccctttgcaggacag

SEQ ID NO: 31248 - DNA, 20 bp, Artificial Sequence
  Synthetic
ggtgagaactcgtgggcaat

SEQ ID NO: 31249 - DNA, 20 bp, Artificial Sequence
  Synthetic
aggtgagaactcgtgggcaa

SEQ ID NO: 31250 - DNA, 20 bp, Artificial Sequence
  Synthetic
cacatcaggtgagaactcgt

SEQ ID NO: 31251 - DNA, 20 bp, Artificial Sequence
  Synthetic
ccacatcaggtgagaactcg

SEQ ID NO: 31252 - DNA, 20 bp, Artificial Sequence
  Synthetic
ccacgagttctcacctgatg

SEQ ID NO: 31253 - DNA, 20 bp, Artificial Sequence
  Synthetic
gcggagactaggaccacatc

SEQ ID NO: 31254 - DNA, 20 bp, Artificial Sequence
  Synthetic
gatgtggtcctagtctccgc

SEQ ID NO: 31255 - DNA, 20 bp, Artificial Sequence
  Synthetic
atgtggtcctagtctccgcc

SEQ ID NO: 31256 - DNA, 20 bp, Artificial Sequence
  Synthetic
catcaaacccggcggagact

SEQ ID NO: 31257 - DNA, 20 bp, Artificial Sequence
  Synthetic
ttcaacagcatcaaacccgg

SEQ ID NO: 31258 - DNA, 20 bp, Artificial Sequence
  Synthetic
gccgggtttgatgctgttga

SEQ ID NO: 31259 - DNA, 20 bp, Artificial Sequence
  Synthetic
tccttcaacagcatcaaacc

SEQ ID NO: 31260 - DNA, 20 bp, Artificial Sequence
  Synthetic
tgaaggacatctgtctcctc

SEQ ID NO: 31261 - DNA, 20 bp, Artificial Sequence
  Synthetic
gaaggacatctgtctcctct

SEQ ID NO: 31262 - DNA, 20 bp, Artificial Sequence
  Synthetic
ggacatctgtctcctctggg

SEQ ID NO: 31263 - DNA, 20 bp, Artificial Sequence
  Synthetic
gtgacagagtagccacccag

SEQ ID NO: 31264 - DNA, 20 bp, Artificial Sequence
  Synthetic
cccagcaggcttacatctgg

SEQ ID NO: 31265 - DNA, 20 bp, Artificial Sequence
  Synthetic
tcccccagcaggcttacatc

SEQ ID NO: 31266 - DNA, 20 bp, Artificial Sequence
  Synthetic
tcacccatcctcaaaggttt

SEQ ID NO: 31267 - DNA, 20 bp, Artificial Sequence
  Synthetic
aaggttttggccacttgacc

SEQ ID NO: 31268 - DNA, 20 bp, Artificial Sequence
  Synthetic
tcatcagctgcctggtcaag

SEQ ID NO: 31269 - DNA, 20 bp, Artificial Sequence
  Synthetic
gaccaggcagctgatgaccc

SEQ ID NO: 31270 - DNA, 20 bp, Artificial Sequence
  Synthetic
tgccagggtcatcagctgcc

SEQ ID NO: 31271 - DNA, 20 bp, Artificial Sequence
  Synthetic
aggcagctgatgaccctggc

SEQ ID NO: 31272 - DNA, 20 bp, Artificial Sequence
  Synthetic
ggcagctgatgaccctggca

SEQ ID NO: 31273 - DNA, 20 bp, Artificial Sequence
  Synthetic
gcagctgatgaccctggcag

SEQ ID NO: 31274 - DNA, 20 bp, Artificial Sequence
  Synthetic
cagctgatgaccctggcagg

SEQ ID NO: 31275 - DNA, 20 bp, Artificial Sequence
  Synthetic
tgatgaccctggcagggggc

SEQ ID NO: 31276 - DNA, 20 bp, Artificial Sequence
  Synthetic
gatgaccctggcagggggcc

SEQ ID NO: 31277 - DNA, 20 bp, Artificial Sequence
  Synthetic
gaccctggcagggggccggg

SEQ ID NO: 31278 - DNA, 20 bp, Artificial Sequence
  Synthetic
caccacccggccccctgcca

SEQ ID NO: 31279 - DNA, 20 bp, Artificial Sequence
  Synthetic
gcaccacccggccccctgcc

SEQ ID NO: 31280 - DNA, 20 bp, Artificial Sequence
  Synthetic
ggcagggggccgggtggtgc

SEQ ID NO: 31281 - DNA, 20 bp, Artificial Sequence
  Synthetic
gggccgggtggtgctggccc

SEQ ID NO: 31282 - DNA, 20 bp, Artificial Sequence
  Synthetic
cctccagggccagcaccacc

SEQ ID NO: 31283 - DNA, 20 bp, Artificial Sequence
  Synthetic
ccgggtggtgctggccctgg

SEQ ID NO: 31284 - DNA, 20 bp, Artificial Sequence
  Synthetic
cgggtggtgctggccctgga

SEQ ID NO: 31285 - DNA, 20 bp, Artificial Sequence
  Synthetic
gtggtgctggccctggaggg

SEQ ID NO: 31286 - DNA, 20 bp, Artificial Sequence
  Synthetic
caagtcatggcctccctcca

SEQ ID NO: 31287 - DNA, 20 bp, Artificial Sequence
  Synthetic
tcaagtcatggcctccctcc

SEQ ID NO: 31288 - DNA, 20 bp, Artificial Sequence
  Synthetic
cacagatggcggtcaagtca

SEQ ID NO: 31289 - DNA, 20 bp, Artificial Sequence
  Synthetic
ctcagaggcatcacagatgg

SEQ ID NO: 31290 - DNA, 20 bp, Artificial Sequence
  Synthetic
cgccatctgtgatgcctctg

SEQ ID NO: 31291 - DNA, 20 bp, Artificial Sequence
  Synthetic
agcctcagaggcatcacaga

SEQ ID NO: 31292 - DNA, 20 bp, Artificial Sequence
  Synthetic
tgcctctgaggcttgtgtct

SEQ ID NO: 31293 - DNA, 20 bp, Artificial Sequence
  Synthetic
agccgagacacaagcctcag

SEQ ID NO: 31294 - DNA, 20 bp, Artificial Sequence
  Synthetic
gctctgtggaccccacactg

SEQ ID NO: 31295 - DNA, 20 bp, Artificial Sequence
  Synthetic
ctctgtggaccccacactgc

SEQ ID NO: 31296 - DNA, 20 bp, Artificial Sequence
  Synthetic
gttgctgctcccgcagtgtg

SEQ ID NO: 31297 - DNA, 20 bp, Artificial Sequence
  Synthetic
agttgctgctcccgcagtgt

SEQ ID NO: 31298 - DNA, 20 bp, Artificial Sequence
  Synthetic
cagttgctgctcccgcagtg

SEQ ID NO: 31299 - DNA, 20 bp, Artificial Sequence
  Synthetic
gcgggagcagcaactgcagc

SEQ ID NO: 31300 - DNA, 20 bp, Artificial Sequence
  Synthetic
gcaactgcagcaggagctcc

SEQ ID NO: 31301 - DNA, 20 bp, Artificial Sequence
  Synthetic
gctgctgctgcttgagcgcc

SEQ ID NO: 31302 - DNA, 20 bp, Artificial Sequence
  Synthetic
gtttctggaactcagcgaac

SEQ ID NO: 31303 - DNA, 20 bp, Artificial Sequence
  Synthetic
tcaggtggtcatgctgtttc

SEQ ID NO: 31304 - DNA, 20 bp, Artificial Sequence
  Synthetic
aacagcatgaccacctgaca

SEQ ID NO: 31305 - DNA, 20 bp, Artificial Sequence
  Synthetic
cctcatgctgccttgtcagg

SEQ ID NO: 31306 - DNA, 20 bp, Artificial Sequence
  Synthetic
ccacctgacaaggcagcatg

SEQ ID NO: 31307 - DNA, 20 bp, Artificial Sequence
  Synthetic
ggacctcatgctgccttgtc

SEQ ID NO: 31308 - DNA, 20 bp, Artificial Sequence
  Synthetic
ccttgaggtgcttctgcagc

SEQ ID NO: 31309 - DNA, 20 bp, Artificial Sequence
  Synthetic
ccagctgcagaagcacctca

SEQ ID NO: 31310 - DNA, 20 bp, Artificial Sequence
  Synthetic
cacccccctcgctcaccttg

SEQ ID NO: 31311 - DNA, 20 bp, Artificial Sequence
  Synthetic
catgcccctgcagcagcagc

SEQ ID NO: 31312 - DNA, 20 bp, Artificial Sequence
  Synthetic
gcagcagcagcaggagatgc

SEQ ID NO: 31313 - DNA, 20 bp, Artificial Sequence
  Synthetic
gctggcagccaagcagcagc

SEQ ID NO: 31314 - DNA, 20 bp, Artificial Sequence
  Synthetic
cagcatctcctgctgctgct

SEQ ID NO: 31315 - DNA, 20 bp, Artificial Sequence
  Synthetic
caagcagcagcaggagatgc

SEQ ID NO: 31316 - DNA, 20 bp, Artificial Sequence
  Synthetic
atcactgcaacttgtgggac

SEQ ID NO: 31317 - DNA, 20 bp, Artificial Sequence
  Synthetic
ctgcaacttgtgggacaggt

SEQ ID NO: 31318 - DNA, 20 bp, Artificial Sequence
  Synthetic
cactgctagccaccaccctg

SEQ ID NO: 31319 - DNA, 20 bp, Artificial Sequence
  Synthetic
gctggggtacctcagggtgg

SEQ ID NO: 31320 - DNA, 20 bp, Artificial Sequence
  Synthetic
tgcgctggggtacctcaggg

SEQ ID NO: 31321 - DNA, 20 bp, Artificial Sequence
  Synthetic
agatgcgctggggtacctca

SEQ ID NO: 31322 - DNA, 20 bp, Artificial Sequence
  Synthetic
aagatgcgctggggtacctc

SEQ ID NO: 31323 - DNA, 20 bp, Artificial Sequence
  Synthetic
aggtaccccagcgcatcttg

SEQ ID NO: 31324 - DNA, 20 bp, Artificial Sequence
  Synthetic
atgatccgcaagatgcgctg

SEQ ID NO: 31325 - DNA, 20 bp, Artificial Sequence
  Synthetic
catgatccgcaagatgcgct

SEQ ID NO: 31326 - DNA, 20 bp, Artificial Sequence
  Synthetic
acatgatccgcaagatgcgc

SEQ ID NO: 31327 - DNA, 20 bp, Artificial Sequence
  Synthetic
cttgcggatcatgtgccgtc

SEQ ID NO: 31328 - DNA, 20 bp, Artificial Sequence
  Synthetic
gcggatcatgtgccgtctgg

SEQ ID NO: 31329 - DNA, 20 bp, Artificial Sequence
  Synthetic
catgtgccgtctggaggagc

SEQ ID NO: 31330 - DNA, 20 bp, Artificial Sequence
  Synthetic
atgtgccgtctggaggagct

SEQ ID NO: 31331 - DNA, 20 bp, Artificial Sequence
  Synthetic
caaggcccagctcctccaga

SEQ ID NO: 31332 - DNA, 20 bp, Artificial Sequence
  Synthetic
ctggaggagctgggccttgc

SEQ ID NO: 31333 - DNA, 20 bp, Artificial Sequence
  Synthetic
tggaggagctgggccttgcc

SEQ ID NO: 31334 - DNA, 20 bp, Artificial Sequence
  Synthetic
gggtgaggcagcgcccggca

SEQ ID NO: 31335 - DNA, 20 bp, Artificial Sequence
  Synthetic
tgtcagggtgaggcagcgcc

SEQ ID NO: 31336 - DNA, 20 bp, Artificial Sequence
  Synthetic
cagggcgcggtgtcagggtg

SEQ ID NO: 31337 - DNA, 20 bp, Artificial Sequence
  Synthetic
tgtggcagggcgcggtgtca

SEQ ID NO: 31338 - DNA, 20 bp, Artificial Sequence
  Synthetic
ctgtggcagggcgcggtgtc

SEQ ID NO: 31339 - DNA, 20 bp, Artificial Sequence
  Synthetic
gacaccgcgccctgccacag

SEQ ID NO: 31340 - DNA, 20 bp, Artificial Sequence
  Synthetic
tcagcctctgtggcagggcg

SEQ ID NO: 31341 - DNA, 20 bp, Artificial Sequence
  Synthetic
gcagctcagcctctgtggca

SEQ ID NO: 31342 - DNA, 20 bp, Artificial Sequence
  Synthetic
agcagctcagcctctgtggc

SEQ ID NO: 31343 - DNA, 20 bp, Artificial Sequence
  Synthetic
ggtgagcagctcagcctctg

SEQ ID NO: 31344 - DNA, 20 bp, Artificial Sequence
  Synthetic
ctgagctgctcacctgtcac

SEQ ID NO: 31345 - DNA, 20 bp, Artificial Sequence
  Synthetic
accggggtctgacctgtgac

SEQ ID NO: 31346 - DNA, 20 bp, Artificial Sequence
  Synthetic
tgcttccagtgctgagtacg

SEQ ID NO: 31347 - DNA, 20 bp, Artificial Sequence
  Synthetic
gcttccagtgctgagtacgt

SEQ ID NO: 31348 - DNA, 20 bp, Artificial Sequence
  Synthetic
atgacccacgtactcagcac

SEQ ID NO: 31349 - DNA, 20 bp, Artificial Sequence
  Synthetic
ctgagtacgtgggtcatctc

SEQ ID NO: 31350 - DNA, 20 bp, Artificial Sequence
  Synthetic
tgagtacgtgggtcatctcc

SEQ ID NO: 31351 - DNA, 20 bp, Artificial Sequence
  Synthetic
ttttcattttctctgtggcc

SEQ ID NO: 31352 - DNA, 20 bp, Artificial Sequence
  Synthetic
ccgggttttcattttctctg

SEQ ID NO: 31353 - DNA, 20 bp, Artificial Sequence
  Synthetic
ccacagagaaaatgaaaacc

SEQ ID NO: 31354 - DNA, 20 bp, Artificial Sequence
  Synthetic
cacagagaaaatgaaaaccc

SEQ ID NO: 31355 - DNA, 20 bp, Artificial Sequence
  Synthetic
actctcacggtgcagctccc

SEQ ID NO: 31356 - DNA, 20 bp, Artificial Sequence
  Synthetic
aactctcacggtgcagctcc

SEQ ID NO: 31357 - DNA, 20 bp, Artificial Sequence
  Synthetic
agtcaaagttggaactctca

SEQ ID NO: 31358 - DNA, 20 bp, Artificial Sequence
  Synthetic
gatatagatggagtcaaagt

SEQ ID NO: 31359 - DNA, 20 bp, Artificial Sequence
  Synthetic
ggtactggggcagatataga

SEQ ID NO: 31360 - DNA, 20 bp, Artificial Sequence
  Synthetic
gtgcacaggcgaaggtactg

SEQ ID NO: 31361 - DNA, 20 bp, Artificial Sequence
  Synthetic
tgtgcacaggcgaaggtact

SEQ ID NO: 31362 - DNA, 20 bp, Artificial Sequence
  Synthetic
ctgtgcacaggcgaaggtac

SEQ ID NO: 31363 - DNA, 20 bp, Artificial Sequence
  Synthetic
ggcaagctgtgcacaggcga

SEQ ID NO: 31364 - DNA, 20 bp, Artificial Sequence
  Synthetic
gcctgtgcacagcttgccac

SEQ ID NO: 31365 - DNA, 20 bp, Artificial Sequence
  Synthetic
gccagtggcaagctgtgcac

SEQ ID NO: 31366 - DNA, 20 bp, Artificial Sequence
  Synthetic
caggcggcaggcagcgccag

SEQ ID NO: 31367 - DNA, 20 bp, Artificial Sequence
  Synthetic
cactggcgctgcctgccgcc

SEQ ID NO: 31368 - DNA, 20 bp, Artificial Sequence
  Synthetic
tggcgctgcctgccgcctgg

SEQ ID NO: 31369 - DNA, 20 bp, Artificial Sequence
  Synthetic
cgctgcctgccgcctggtgg

SEQ ID NO: 31370 - DNA, 20 bp, Artificial Sequence
  Synthetic
cacagcctccaccaggcggc

SEQ ID NO: 31371 - DNA, 20 bp, Artificial Sequence
  Synthetic
agagcacagcctccaccagg

SEQ ID NO: 31372 - DNA, 20 bp, Artificial Sequence
  Synthetic
ctgagagcacagcctccacc

SEQ ID NO: 31373 - DNA, 20 bp, Artificial Sequence
  Synthetic
ctggtggaggctgtgctctc

SEQ ID NO: 31374 - DNA, 20 bp, Artificial Sequence
  Synthetic
ggaggctgtgctctcaggag

SEQ ID NO: 31375 - DNA, 20 bp, Artificial Sequence
  Synthetic
gctgcttcccaggttctgaa

SEQ ID NO: 31376 - DNA, 20 bp, Artificial Sequence
  Synthetic
cagcagcaccattcagaacc

SEQ ID NO: 31377 - DNA, 20 bp, Artificial Sequence
  Synthetic
ggttctgaatggtgctgctg

SEQ ID NO: 31378 - DNA, 20 bp, Artificial Sequence
  Synthetic
gctgctgtggtgcgtccccc

SEQ ID NO: 31379 - DNA, 20 bp, Artificial Sequence
  Synthetic
tgctctgcgtggtgtcctgg

SEQ ID NO: 31380 - DNA, 20 bp, Artificial Sequence
  Synthetic
ctgctctgcgtggtgtcctg

SEQ ID NO: 31381 - DNA, 20 bp, Artificial Sequence
  Synthetic
cctgctctgcgtggtgtcct

SEQ ID NO: 31382 - DNA, 20 bp, Artificial Sequence
  Synthetic
cccaggacaccacgcagagc

SEQ ID NO: 31383 - DNA, 20 bp, Artificial Sequence
  Synthetic
tcctgctctgcgtggtgtcc

SEQ ID NO: 31384 - DNA, 20 bp, Artificial Sequence
  Synthetic
aagctgcatcctgctctgcg

SEQ ID NO: 31385 - DNA, 20 bp, Artificial Sequence
  Synthetic
gcagagcaggatgcagcttg

SEQ ID NO: 31386 - DNA, 20 bp, Artificial Sequence
  Synthetic
tttttgctttttcaactctg

SEQ ID NO: 31387 - DNA, 20 bp, Artificial Sequence
  Synthetic
ctttttcaactctgtggctg

SEQ ID NO: 31388 - DNA, 20 bp, Artificial Sequence
  Synthetic
cgccatgcccagactatcag

SEQ ID NO: 31389 - DNA, 20 bp, Artificial Sequence
  Synthetic
gccatgcccagactatcagt

SEQ ID NO: 31390 - DNA, 20 bp, Artificial Sequence
  Synthetic
gcccactgatagtctgggca

SEQ ID NO: 31391 - DNA, 20 bp, Artificial Sequence
  Synthetic
ggcatgcccactgatagtct

SEQ ID NO: 31392 - DNA, 20 bp, Artificial Sequence
  Synthetic
gggcatgcccactgatagtc

SEQ ID NO: 31393 - DNA, 20 bp, Artificial Sequence
  Synthetic
ctatcagtgggcatgcccta

SEQ ID NO: 31394 - DNA, 20 bp, Artificial Sequence
  Synthetic
cccagggagtccttaccgta

SEQ ID NO: 31395 - DNA, 20 bp, Artificial Sequence
  Synthetic
ccccagggagtccttaccgt

SEQ ID NO: 31396 - DNA, 20 bp, Artificial Sequence
  Synthetic
cctccccaggatcctgattg

SEQ ID NO: 31397 - DNA, 20 bp, Artificial Sequence
  Synthetic
ccaatccacaatcaggatcc

SEQ ID NO: 31398 - DNA, 20 bp, Artificial Sequence
  Synthetic
ccaggatcctgattgtggat

SEQ ID NO: 31399 - DNA, 20 bp, Artificial Sequence
  Synthetic
caggatcctgattgtggatt

SEQ ID NO: 31400 - DNA, 20 bp, Artificial Sequence
  Synthetic
ggacatcccaatccacaatc

SEQ ID NO: 31401 - DNA, 20 bp, Artificial Sequence
  Synthetic
gtggattgggatgtccacca

SEQ ID NO: 31402 - DNA, 20 bp, Artificial Sequence
  Synthetic
tgggatgtccaccacggtaa

SEQ ID NO: 31403 - DNA, 20 bp, Artificial Sequence
  Synthetic
gctgagttccattaccgtgg

SEQ ID NO: 31404 - DNA, 20 bp, Artificial Sequence
  Synthetic
tgtgctgagttccattaccg

SEQ ID NO: 31405 - DNA, 20 bp, Artificial Sequence
  Synthetic
tggaactcagcacatgtttg

SEQ ID NO: 31406 - DNA, 20 bp, Artificial Sequence
  Synthetic
acatgtttgaggatgacccc

SEQ ID NO: 31407 - DNA, 20 bp, Artificial Sequence
  Synthetic
ctgactgcagcccttacctg

SEQ ID NO: 31408 - DNA, 20 bp, Artificial Sequence
  Synthetic
tccctgcaccgctatgatca

SEQ ID NO: 31409 - DNA, 20 bp, Artificial Sequence
  Synthetic
gccatgatcatagcggtgca

SEQ ID NO: 31410 - DNA, 20 bp, Artificial Sequence
  Synthetic
tgccatgatcatagcggtgc

SEQ ID NO: 31411 - DNA, 20 bp, Artificial Sequence
  Synthetic
agaaggtgccatgatcatag

SEQ ID NO: 31412 - DNA, 20 bp, Artificial Sequence
  Synthetic
tcatggcaccttcttcccca

SEQ ID NO: 31413 - DNA, 20 bp, Artificial Sequence
  Synthetic
catggcaccttcttccccat

SEQ ID NO: 31414 - DNA, 20 bp, Artificial Sequence
  Synthetic
atggcaccttcttccccatg

SEQ ID NO: 31415 - DNA, 20 bp, Artificial Sequence
  Synthetic
tggcaccttcttccccatgg

SEQ ID NO: 31416 - DNA, 20 bp, Artificial Sequence
  Synthetic
ctcatcccccatggggaaga

SEQ ID NO: 31417 - DNA, 20 bp, Artificial Sequence
  Synthetic
cttcttccccatgggggatg

SEQ ID NO: 31418 - DNA, 20 bp, Artificial Sequence
  Synthetic
ttcttccccatgggggatga

SEQ ID NO: 31419 - DNA, 20 bp, Artificial Sequence
  Synthetic
tggcaccctcatcccccatg

SEQ ID NO: 31420 - DNA, 20 bp, Artificial Sequence
  Synthetic
ctggcaccctcatcccccat

SEQ ID NO: 31421 - DNA, 20 bp, Artificial Sequence
  Synthetic
gctggcaccctcatccccca

SEQ ID NO: 31422 - DNA, 20 bp, Artificial Sequence
  Synthetic
gagggtgccagcagccagat

SEQ ID NO: 31423 - DNA, 20 bp, Artificial Sequence
  Synthetic
gtgccagcagccagatcggc

SEQ ID NO: 31424 - DNA, 20 bp, Artificial Sequence
  Synthetic
tgccagcagccagatcggcc

SEQ ID NO: 31425 - DNA, 20 bp, Artificial Sequence
  Synthetic
agcccggccgatctggctgc

SEQ ID NO: 31426 - DNA, 20 bp, Artificial Sequence
  Synthetic
cagccagatcggccgggctg

SEQ ID NO: 31427 - DNA, 20 bp, Artificial Sequence
  Synthetic
agccagatcggccgggctgc

SEQ ID NO: 31428 - DNA, 20 bp, Artificial Sequence
  Synthetic
tgcccgcagcccggccgatc

SEQ ID NO: 31429 - DNA, 20 bp, Artificial Sequence
  Synthetic
atcggccgggctgcgggcac

SEQ ID NO: 31430 - DNA, 20 bp, Artificial Sequence
  Synthetic
tgaagcctgtgcccgcagcc

SEQ ID NO: 31431 - DNA, 20 bp, Artificial Sequence
  Synthetic
cacaggcttcaccgtcaacg

SEQ ID NO: 31432 - DNA, 20 bp, Artificial Sequence
  Synthetic
gcttcaccgtcaacgtggca

SEQ ID NO: 31433 - DNA, 20 bp, Artificial Sequence
  Synthetic
accgtcaacgtggcatggaa

SEQ ID NO: 31434 - DNA, 20 bp, Artificial Sequence
  Synthetic
cccgttccatgccacgttga

SEQ ID NO: 31435 - DNA, 20 bp, Artificial Sequence
  Synthetic
ccgtcaacgtggcatggaac

SEQ ID NO: 31436 - DNA, 20 bp, Artificial Sequence
  Synthetic
ggcatggaacgggccccgca

SEQ ID NO: 31437 - DNA, 20 bp, Artificial Sequence
  Synthetic
gcatggaacgggccccgcat

SEQ ID NO: 31438 - DNA, 20 bp, Artificial Sequence
  Synthetic
tagtcagcatcacccatgcg

SEQ ID NO: 31439 - DNA, 20 bp, Artificial Sequence
  Synthetic
gtagtcagcatcacccatgc

SEQ ID NO: 31440 - DNA, 20 bp, Artificial Sequence
  Synthetic
ggtagtcagcatcacccatg

SEQ ID NO: 31441 - DNA, 20 bp, Artificial Sequence
  Synthetic
atgctgactacctagctgcc

SEQ ID NO: 31442 - DNA, 20 bp, Artificial Sequence
  Synthetic
ccaggcgatgccaggcagct

SEQ ID NO: 31443 - DNA, 20 bp, Artificial Sequence
  Synthetic
cctagctgcctggcatcgcc

SEQ ID NO: 31444 - DNA, 20 bp, Artificial Sequence
  Synthetic
gggaagcaccaggcgatgcc

SEQ ID NO: 31445 - DNA, 20 bp, Artificial Sequence
  Synthetic
cgtaggcaatgggaagcacc

SEQ ID NO: 31446 - DNA, 20 bp, Artificial Sequence
  Synthetic
ggtgcttcccattgcctacg

SEQ ID NO: 31447 - DNA, 20 bp, Artificial Sequence
  Synthetic
agctgtacctcgtaggcaat

SEQ ID NO: 31448 - DNA, 20 bp, Artificial Sequence
  Synthetic
gagctgtacctcgtaggcaa

SEQ ID NO: 31449 - DNA, 20 bp, Artificial Sequence
  Synthetic
tatcctgagctgtacctcgt

SEQ ID NO: 31450 - DNA, 20 bp, Artificial Sequence
  Synthetic
gcctcagtttaacccagaac

SEQ ID NO: 31451 - DNA, 20 bp, Artificial Sequence
  Synthetic
gtttaacccagaactggtgc

SEQ ID NO: 31452 - DNA, 20 bp, Artificial Sequence
  Synthetic
ctgagaccagcaccagttct

SEQ ID NO: 31453 - DNA, 20 bp, Artificial Sequence
  Synthetic
gctgagaccagcaccagttc

SEQ ID NO: 31454 - DNA, 20 bp, Artificial Sequence
  Synthetic
gaactggtgctggtctcagc

SEQ ID NO: 31455 - DNA, 20 bp, Artificial Sequence
  Synthetic
cagctggctttgatgctgca

SEQ ID NO: 31456 - DNA, 20 bp, Artificial Sequence
  Synthetic
agctggctttgatgctgcac

SEQ ID NO: 31457 - DNA, 20 bp, Artificial Sequence
  Synthetic
gctggctttgatgctgcacg

SEQ ID NO: 31458 - DNA, 20 bp, Artificial Sequence
  Synthetic
ctggctttgatgctgcacgg

SEQ ID NO: 31459 - DNA, 20 bp, Artificial Sequence
  Synthetic
tggctttgatgctgcacggg

SEQ ID NO: 31460 - DNA, 20 bp, Artificial Sequence
  Synthetic
tgctgcacggggggatccgc

SEQ ID NO: 31461 - DNA, 20 bp, Artificial Sequence
  Synthetic
gctgcacggggggatccgct

SEQ ID NO: 31462 - DNA, 20 bp, Artificial Sequence
  Synthetic
ctgcacggggggatccgctg

SEQ ID NO: 31463 - DNA, 20 bp, Artificial Sequence
  Synthetic
tgcacggggggatccgctgg

SEQ ID NO: 31464 - DNA, 20 bp, Artificial Sequence
  Synthetic
gcacggggggatccgctggg

SEQ ID NO: 31465 - DNA, 20 bp, Artificial Sequence
  Synthetic
ggatccgctggggggctgcc

SEQ ID NO: 31466 - DNA, 20 bp, Artificial Sequence
  Synthetic
gacacctggcagccccccag

SEQ ID NO: 31467 - DNA, 20 bp, Artificial Sequence
  Synthetic
gggctgccaggtgtcacctg

SEQ ID NO: 31468 - DNA, 20 bp, Artificial Sequence
  Synthetic
ggctgccaggtgtcacctga

SEQ ID NO: 31469 - DNA, 20 bp, Artificial Sequence
  Synthetic
cataaccctcaggtgacacc

SEQ ID NO: 31470 - DNA, 20 bp, Artificial Sequence
  Synthetic
gtgaggtgggcataaccctc

SEQ ID NO: 31471 - DNA, 20 bp, Artificial Sequence
  Synthetic
catcagcaggtgggtgaggt

SEQ ID NO: 31472 - DNA, 20 bp, Artificial Sequence
  Synthetic
ccatcagcaggtgggtgagg

SEQ ID NO: 31473 - DNA, 20 bp, Artificial Sequence
  Synthetic
ccacctcacccacctgctga

SEQ ID NO: 31474 - DNA, 20 bp, Artificial Sequence
  Synthetic
cacctcacccacctgctgat

SEQ ID NO: 31475 - DNA, 20 bp, Artificial Sequence
  Synthetic
ggcccatcagcaggtgggtg

SEQ ID NO: 31476 - DNA, 20 bp, Artificial Sequence
  Synthetic
ggcaaggcccatcagcaggt

SEQ ID NO: 31477 - DNA, 20 bp, Artificial Sequence
  Synthetic
tggcaaggcccatcagcagg

SEQ ID NO: 31478 - DNA, 20 bp, Artificial Sequence
  Synthetic
cactggcaaggcccatcagc

SEQ ID NO: 31479 - DNA, 20 bp, Artificial Sequence
  Synthetic
ctgctgatgggccttgccag

SEQ ID NO: 31480 - DNA, 20 bp, Artificial Sequence
  Synthetic
ggataatgcggccactggca

SEQ ID NO: 31481 - DNA, 20 bp, Artificial Sequence
  Synthetic
gataaggataatgcggccac

SEQ ID NO: 31482 - DNA, 20 bp, Artificial Sequence
  Synthetic
cctctaggataaggataatg

SEQ ID NO: 31483 - DNA, 20 bp, Artificial Sequence
  Synthetic
ccgcattatccttatcctag

SEQ ID NO: 31484 - DNA, 20 bp, Artificial Sequence
  Synthetic
agaaagttacctctaggata

SEQ ID NO: 31485 - DNA, 20 bp, Artificial Sequence
  Synthetic
accaagagaaagttacctct

SEQ ID NO: 31486 - DNA, 20 bp, Artificial Sequence
  Synthetic
tggactctgagatggatgtc

SEQ ID NO: 31487 - DNA, 20 bp, Artificial Sequence
  Synthetic
gacatccatctcagagtcca

SEQ ID NO: 31488 - DNA, 20 bp, Artificial Sequence
  Synthetic
ggcagccatggactctgaga

SEQ ID NO: 31489 - DNA, 20 bp, Artificial Sequence
  Synthetic
ggagcgagtgcaggcagcca

SEQ ID NO: 31490 - DNA, 20 bp, Artificial Sequence
  Synthetic
gcctgcactcgctccctcct

SEQ ID NO: 31491 - DNA, 20 bp, Artificial Sequence
  Synthetic
tccaaggagggagcgagtgc

SEQ ID NO: 31492 - DNA, 20 bp, Artificial Sequence
  Synthetic
tccattgcctctgggatgac

SEQ ID NO: 31493 - DNA, 20 bp, Artificial Sequence
  Synthetic
actccatctccccagcttcc

SEQ ID NO: 31494 - DNA, 20 bp, Artificial Sequence
  Synthetic
catctccccagcttcccgga

SEQ ID NO: 31495 - DNA, 20 bp, Artificial Sequence
  Synthetic
ctcagggccttccgggaagc

SEQ ID NO: 31496 - DNA, 20 bp, Artificial Sequence
  Synthetic
gcttcccggaaggccctgag

SEQ ID NO: 31497 - DNA, 20 bp, Artificial Sequence
  Synthetic
ggagccgctcagggccttcc

SEQ ID NO: 31498 - DNA, 20 bp, Artificial Sequence
  Synthetic
tggagccgctcagggccttc

SEQ ID NO: 31499 - DNA, 20 bp, Artificial Sequence
  Synthetic
tgatggcatggagccgctca

SEQ ID NO: 31500 - DNA, 20 bp, Artificial Sequence
  Synthetic
ttgatggcatggagccgctc

SEQ ID NO: 31501 - DNA, 20 bp, Artificial Sequence
  Synthetic
tgagcggctccatgccatca

SEQ ID NO: 31502 - DNA, 20 bp, Artificial Sequence
  Synthetic
tcagttgctccttgatggca

SEQ ID NO: 31503 - DNA, 20 bp, Artificial Sequence
  Synthetic
ctggatcagttgctccttga

SEQ ID NO: 31504 - DNA, 20 bp, Artificial Sequence
  Synthetic
catcaaggagcaactgatcc

SEQ ID NO: 31505 - DNA, 20 bp, Artificial Sequence
  Synthetic
caaggagcaactgatccagg

SEQ ID NO: 31506 - DNA, 20 bp, Artificial Sequence
  Synthetic
aaggagcaactgatccagga

SEQ ID NO: 31507 - DNA, 20 bp, Artificial Sequence
  Synthetic
agcgatctaggaggccctcc

SEQ ID NO: 31508 - DNA, 20 bp, Artificial Sequence
  Synthetic
aggacacgcagcgatctagg

SEQ ID NO: 31509 - DNA, 20 bp, Artificial Sequence
  Synthetic
gaaaggacacgcagcgatct

SEQ ID NO: 31510 - DNA, 20 bp, Artificial Sequence
  Synthetic
agatcgctgcgtgtcctttc

SEQ ID NO: 31511 - DNA, 20 bp, Artificial Sequence
  Synthetic
gcttgggggccttacctgaa

SEQ ID NO: 31512 - DNA, 20 bp, Artificial Sequence
  Synthetic
ccttttcagcaaaccgggcc

SEQ ID NO: 31513 - DNA, 20 bp, Artificial Sequence
  Synthetic
ccaggcccggtttgctgaaa

SEQ ID NO: 31514 - DNA, 20 bp, Artificial Sequence
  Synthetic
ctcttccttttcagcaaacc

SEQ ID NO: 31515 - DNA, 20 bp, Artificial Sequence
  Synthetic
gctcttccttttcagcaaac

SEQ ID NO: 31516 - DNA, 20 bp, Artificial Sequence
  Synthetic
tgaaaaggaagagctgatgt

SEQ ID NO: 31517 - DNA, 20 bp, Artificial Sequence
  Synthetic
aagagctgatgttggttcac

SEQ ID NO: 31518 - DNA, 20 bp, Artificial Sequence
  Synthetic
ccatcagatcaatatattct

SEQ ID NO: 31519 - DNA, 20 bp, Artificial Sequence
  Synthetic
cctagaatatattgatctga

SEQ ID NO: 31520 - DNA, 20 bp, Artificial Sequence
  Synthetic
aacaacccagtacatgaatg

SEQ ID NO: 31521 - DNA, 20 bp, Artificial Sequence
  Synthetic
acaacccagtacatgaatga

SEQ ID NO: 31522 - DNA, 20 bp, Artificial Sequence
  Synthetic
ttctccctcattcatgtact

SEQ ID NO: 31523 - DNA, 20 bp, Artificial Sequence
  Synthetic
gttctccctcattcatgtac

SEQ ID NO: 31524 - DNA, 20 bp, Artificial Sequence
  Synthetic
cgtaggtgtctgctaggaca

SEQ ID NO: 31525 - DNA, 20 bp, Artificial Sequence
  Synthetic
ctgagtcgtaggtgtctgct

SEQ ID NO: 31526 - DNA, 20 bp, Artificial Sequence
  Synthetic
atgcagataaactgagtcgt

SEQ ID NO: 31527 - DNA, 20 bp, Artificial Sequence
  Synthetic
cgactcagtttatctgcatc

SEQ ID NO: 31528 - DNA, 20 bp, Artificial Sequence
  Synthetic
aggcacaggagtatgagttc

SEQ ID NO: 31529 - DNA, 20 bp, Artificial Sequence
  Synthetic
ctcatactcctgtgcctgcc

SEQ ID NO: 31530 - DNA, 20 bp, Artificial Sequence
  Synthetic
tcctgtgcctgcctggcctc

SEQ ID NO: 31531 - DNA, 20 bp, Artificial Sequence
  Synthetic
gcctgaggccaggcaggcac

SEQ ID NO: 31532 - DNA, 20 bp, Artificial Sequence
  Synthetic
gacagagcctgaggccaggc

SEQ ID NO: 31533 - DNA, 20 bp, Artificial Sequence
  Synthetic
tgaggacagagcctgaggcc

SEQ ID NO: 31534 - DNA, 20 bp, Artificial Sequence
  Synthetic
tggcctcaggctctgtcctc

SEQ ID NO: 31535 - DNA, 20 bp, Artificial Sequence
  Synthetic
cagcctgaggacagagcctg

SEQ ID NO: 31536 - DNA, 20 bp, Artificial Sequence
  Synthetic
ctcaggctctgtcctcaggc

SEQ ID NO: 31537 - DNA, 20 bp, Artificial Sequence
  Synthetic
aggctctgtcctcaggctgg

SEQ ID NO: 31538 - DNA, 20 bp, Artificial Sequence
  Synthetic
tgtcctcaggctggtggatg

SEQ ID NO: 31539 - DNA, 20 bp, Artificial Sequence
  Synthetic
ggaccgcatccaccagcctg

SEQ ID NO: 31540 - DNA, 20 bp, Artificial Sequence
  Synthetic
caggctggtggatgcggtcc

SEQ ID NO: 31541 - DNA, 20 bp, Artificial Sequence
  Synthetic
aggctggtggatgcggtcct

SEQ ID NO: 31542 - DNA, 20 bp, Artificial Sequence
  Synthetic
ggctggtggatgcggtcctg

SEQ ID NO: 31543 - DNA, 20 bp, Artificial Sequence
  Synthetic
gctggtggatgcggtcctgg

SEQ ID NO: 31544 - DNA, 20 bp, Artificial Sequence
  Synthetic
cggtcctgggggctgagatc

SEQ ID NO: 31545 - DNA, 20 bp, Artificial Sequence
  Synthetic
cattccggatctcagccccc

SEQ ID NO: 31546 - DNA, 20 bp, Artificial Sequence
  Synthetic
ctgggggctgagatccggaa

SEQ ID NO: 31547 - DNA, 20 bp, Artificial Sequence
  Synthetic
ggctgagatccggaatggca

SEQ ID NO: 31548 - DNA, 20 bp, Artificial Sequence
  Synthetic
taatgatggccatgccattc

SEQ ID NO: 31549 - DNA, 20 bp, Artificial Sequence
  Synthetic
ggaatggcatggccatcatt

SEQ ID NO: 31550 - DNA, 20 bp, Artificial Sequence
  Synthetic
tggcatggccatcattaggt

SEQ ID NO: 31551 - DNA, 20 bp, Artificial Sequence
  Synthetic
tgtagagtcctacctaatga

SEQ ID NO: 31552 - DNA, 20 bp, Artificial Sequence
  Synthetic
cttgtcttgcccaggcctcc

SEQ ID NO: 31553 - DNA, 20 bp, Artificial Sequence
  Synthetic
ggcgtgatgtccaggaggcc

SEQ ID NO: 31554 - DNA, 20 bp, Artificial Sequence
  Synthetic
tgctgggcgtgatgtccagg

SEQ ID NO: 31555 - DNA, 20 bp, Artificial Sequence
  Synthetic
ctgtgctgggcgtgatgtcc

SEQ ID NO: 31556 - DNA, 20 bp, Artificial Sequence
  Synthetic
tcacgcccagcacagtctta

SEQ ID NO: 31557 - DNA, 20 bp, Artificial Sequence
  Synthetic
gcccagcacagtcttatgga

SEQ ID NO: 31558 - DNA, 20 bp, Artificial Sequence
  Synthetic
gccatccataagactgtgct

SEQ ID NO: 31559 - DNA, 20 bp, Artificial Sequence
  Synthetic
agccatccataagactgtgc

SEQ ID NO: 31560 - DNA, 20 bp, Artificial Sequence
  Synthetic
ctattgcatgttcaaccacg

SEQ ID NO: 31561 - DNA, 20 bp, Artificial Sequence
  Synthetic
catgttcaaccacgtggctg

SEQ ID NO: 31562 - DNA, 20 bp, Artificial Sequence
  Synthetic
agcgggctgccacagccacg

SEQ ID NO: 31563 - DNA, 20 bp, Artificial Sequence
  Synthetic
gtgtttctgttgagcatagc

SEQ ID NO: 31564 - DNA, 20 bp, Artificial Sequence
  Synthetic
ggtgtttctgttgagcatag

SEQ ID NO: 31565 - DNA, 20 bp, Artificial Sequence
  Synthetic
ctcaacagaaacaccgcatc

SEQ ID NO: 31566 - DNA, 20 bp, Artificial Sequence
  Synthetic
aacagaaacaccgcatccgg

SEQ ID NO: 31567 - DNA, 20 bp, Artificial Sequence
  Synthetic
ctgttgctgacctccggatg

SEQ ID NO: 31568 - DNA, 20 bp, Artificial Sequence
  Synthetic
tgccctctgttgctgacctc

SEQ ID NO: 31569 - DNA, 20 bp, Artificial Sequence
  Synthetic
ctagggtccttatcgtagat

SEQ ID NO: 31570 - DNA, 20 bp, Artificial Sequence
  Synthetic
tagggtccttatcgtagatt

SEQ ID NO: 31571 - DNA, 20 bp, Artificial Sequence
  Synthetic
gcacatcccaatctacgata

SEQ ID NO: 31572 - DNA, 20 bp, Artificial Sequence
  Synthetic
gtagattgggatgtgcacca

SEQ ID NO: 31573 - DNA, 20 bp, Artificial Sequence
  Synthetic
tgggatgtgcaccacggtca

SEQ ID NO: 31574 - DNA, 20 bp, Artificial Sequence
  Synthetic
tgaactgtgttccttgaccg

SEQ ID NO: 31575 - DNA, 20 bp, Artificial Sequence
  Synthetic
aacacagttcaccttcgacc

SEQ ID NO: 31576 - DNA, 20 bp, Artificial Sequence
  Synthetic
tcaccttcgaccaggacccc

SEQ ID NO: 31577 - DNA, 20 bp, Artificial Sequence
  Synthetic
atacctggggtcctggtcga

SEQ ID NO: 31578 - DNA, 20 bp, Artificial Sequence
  Synthetic
tcggggtatacctggggtcc

SEQ ID NO: 31579 - DNA, 20 bp, Artificial Sequence
  Synthetic
tgggagtcggggtatacctg

SEQ ID NO: 31580 - DNA, 20 bp, Artificial Sequence
  Synthetic
gatggagaaatagaggacac

SEQ ID NO: 31581 - DNA, 20 bp, Artificial Sequence
  Synthetic
agcggtggatggagaaatag

SEQ ID NO: 31582 - DNA, 20 bp, Artificial Sequence
  Synthetic
ctccatccaccgctacgagc

SEQ ID NO: 31583 - DNA, 20 bp, Artificial Sequence
  Synthetic
tccatccaccgctacgagca

SEQ ID NO: 31584 - DNA, 20 bp, Artificial Sequence
  Synthetic
accctgctcgtagcggtgga

SEQ ID NO: 31585 - DNA, 20 bp, Artificial Sequence
  Synthetic
tccaccgctacgagcagggt

SEQ ID NO: 31586 - DNA, 20 bp, Artificial Sequence
  Synthetic
acctaccctgctcgtagcgg

SEQ ID NO: 31587 - DNA, 20 bp, Artificial Sequence
  Synthetic
agaacctaccctgctcgtag

SEQ ID NO: 31588 - DNA, 20 bp, Artificial Sequence
  Synthetic
gctacgagcagggtaggttc

SEQ ID NO: 31589 - DNA, 20 bp, Artificial Sequence
  Synthetic
taggttctggccccacctga

SEQ ID NO: 31590 - DNA, 20 bp, Artificial Sequence
  Synthetic
cagttagaggccttcaggtg

SEQ ID NO: 31591 - DNA, 20 bp, Artificial Sequence
  Synthetic
ccagttagaggccttcaggt

SEQ ID NO: 31592 - DNA, 20 bp, Artificial Sequence
  Synthetic
cccacctgaaggcctctaac

SEQ ID NO: 31593 - DNA, 20 bp, Artificial Sequence
  Synthetic
accagttagaggccttcagg

SEQ ID NO: 31594 - DNA, 20 bp, Artificial Sequence
  Synthetic
tggaccagttagaggccttc

SEQ ID NO: 31595 - DNA, 20 bp, Artificial Sequence
  Synthetic
gcctctaactggtccaccac

SEQ ID NO: 31596 - DNA, 20 bp, Artificial Sequence
  Synthetic
acctgtggtggaccagttag

SEQ ID NO: 31597 - DNA, 20 bp, Artificial Sequence
  Synthetic
aactggtccaccacaggttt

SEQ ID NO: 31598 - DNA, 20 bp, Artificial Sequence
  Synthetic
tccaccacaggtttcggcca

SEQ ID NO: 31599 - DNA, 20 bp, Artificial Sequence
  Synthetic
gccttggccgaaacctgtgg

SEQ ID NO: 31600 - DNA, 20 bp, Artificial Sequence
  Synthetic
ttggccttggccgaaacctg

SEQ ID NO: 31601 - DNA, 20 bp, Artificial Sequence
  Synthetic
acaggtttcggccaaggcca

SEQ ID NO: 31602 - DNA, 20 bp, Artificial Sequence
  Synthetic
tgatggtatatccttggcct

SEQ ID NO: 31603 - DNA, 20 bp, Artificial Sequence
  Synthetic
gcacattgatggtatatcct

SEQ ID NO: 31604 - DNA, 20 bp, Artificial Sequence
  Synthetic
gatataccatcaatgtgcct

SEQ ID NO: 31605 - DNA, 20 bp, Artificial Sequence
  Synthetic
ctggttccaaggcacattga

SEQ ID NO: 31606 - DNA, 20 bp, Artificial Sequence
  Synthetic
catcaatgtgccttggaacc

SEQ ID NO: 31607 - DNA, 20 bp, Artificial Sequence
  Synthetic
tagatgctgacctggttcca

SEQ ID NO: 31608 - DNA, 20 bp, Artificial Sequence
  Synthetic
tgtgtctgcaggtggggatg

SEQ ID NO: 31609 - DNA, 20 bp, Artificial Sequence
  Synthetic
gtgtctgcaggtggggatgc

SEQ ID NO: 31610 - DNA, 20 bp, Artificial Sequence
  Synthetic
cgactggcagcaggacgtgc

SEQ ID NO: 31611 - DNA, 20 bp, Artificial Sequence
  Synthetic
cctcgagggcgactggcagc

SEQ ID NO: 31612 - DNA, 20 bp, Artificial Sequence
  Synthetic
cctgctgccagtcgccctcg

SEQ ID NO: 31613 - DNA, 20 bp, Artificial Sequence
  Synthetic
cccaggacctcgagggcgac

SEQ ID NO: 31614 - DNA, 20 bp, Artificial Sequence
  Synthetic
ccagatccccaggacctcga

SEQ ID NO: 31615 - DNA, 20 bp, Artificial Sequence
  Synthetic
cccagatccccaggacctcg

SEQ ID NO: 31616 - DNA, 20 bp, Artificial Sequence
  Synthetic
ccttcagttccagcctcagc

SEQ ID NO: 31617 - DNA, 20 bp, Artificial Sequence
  Synthetic
gttccagcctcagctggtcc

SEQ ID NO: 31618 - DNA, 20 bp, Artificial Sequence
  Synthetic
ccaccaggaccagctgaggc

SEQ ID NO: 31619 - DNA, 20 bp, Artificial Sequence
  Synthetic
ccagcctcagctggtcctgg

SEQ ID NO: 31620 - DNA, 20 bp, Artificial Sequence
  Synthetic
gcagccaccaggaccagctg

SEQ ID NO: 31621 - DNA, 20 bp, Artificial Sequence
  Synthetic
cagctggtcctggtggctgc

SEQ ID NO: 31622 - DNA, 20 bp, Artificial Sequence
  Synthetic
catcaaatccagcagccacc

SEQ ID NO: 31623 - DNA, 20 bp, Artificial Sequence
  Synthetic
gctggatttgatgccctgca

SEQ ID NO: 31624 - DNA, 20 bp, Artificial Sequence
  Synthetic
ctggatttgatgccctgcaa

SEQ ID NO: 31625 - DNA, 20 bp, Artificial Sequence
  Synthetic
tggatttgatgccctgcaag

SEQ ID NO: 31626 - DNA, 20 bp, Artificial Sequence
  Synthetic
tgccctgcaaggggacccca

SEQ ID NO: 31627 - DNA, 20 bp, Artificial Sequence
  Synthetic
taccttggggtccccttgca

SEQ ID NO: 31628 - DNA, 20 bp, Artificial Sequence
  Synthetic
ttaccttggggtccccttgc

SEQ ID NO: 31629 - DNA, 20 bp, Artificial Sequence
  Synthetic
agggagcctgccttaccttg

SEQ ID NO: 31630 - DNA, 20 bp, Artificial Sequence
  Synthetic
cagggagcctgccttacctt

SEQ ID NO: 31631 - DNA, 20 bp, Artificial Sequence
  Synthetic
catgtccccccagggtgaga

SEQ ID NO: 31632 - DNA, 20 bp, Artificial Sequence
  Synthetic
gagtggcggccatctcaccc

SEQ ID NO: 31633 - DNA, 20 bp, Artificial Sequence
  Synthetic
gggtgagatggccgccactc

SEQ ID NO: 31634 - DNA, 20 bp, Artificial Sequence
  Synthetic
gagatggccgccactccggc

SEQ ID NO: 31635 - DNA, 20 bp, Artificial Sequence
  Synthetic
agatggccgccactccggca

SEQ ID NO: 31636 - DNA, 20 bp, Artificial Sequence
  Synthetic
ggcgaaccctgccggagtgg

SEQ ID NO: 31637 - DNA, 20 bp, Artificial Sequence
  Synthetic
ctgggcgaaccctgccggag

SEQ ID NO: 31638 - DNA, 20 bp, Artificial Sequence
  Synthetic
gttagctgggcgaaccctgc

SEQ ID NO: 31639 - DNA, 20 bp, Artificial Sequence
  Synthetic
catgagcaggtgggttagct

SEQ ID NO: 31640 - DNA, 20 bp, Artificial Sequence
  Synthetic
ccatgagcaggtgggttagc

SEQ ID NO: 31641 - DNA, 20 bp, Artificial Sequence
  Synthetic
ccagctaacccacctgctca

SEQ ID NO: 31642 - DNA, 20 bp, Artificial Sequence
  Synthetic
cagctaacccacctgctcat

SEQ ID NO: 31643 - DNA, 20 bp, Artificial Sequence
  Synthetic
aacccacctgctcatgggtc

SEQ ID NO: 31644 - DNA, 20 bp, Artificial Sequence
  Synthetic
tgccagacccatgagcaggt

SEQ ID NO: 31645 - DNA, 20 bp, Artificial Sequence
  Synthetic
ctgccagacccatgagcagg

SEQ ID NO: 31646 - DNA, 20 bp, Artificial Sequence
  Synthetic
cacctgctcatgggtctggc

SEQ ID NO: 31647 - DNA, 20 bp, Artificial Sequence
  Synthetic
ctcctgccagacccatgagc

SEQ ID NO: 31648 - DNA, 20 bp, Artificial Sequence
  Synthetic
ctgctcatgggtctggcagg

SEQ ID NO: 31649 - DNA, 20 bp, Artificial Sequence
  Synthetic
aggcaagctgatcctgtctc

SEQ ID NO: 31650 - DNA, 20 bp, Artificial Sequence
  Synthetic
caagctgatcctgtctctgg

SEQ ID NO: 31651 - DNA, 20 bp, Artificial Sequence
  Synthetic
agtcactcacctccagagac

SEQ ID NO: 31652 - DNA, 20 bp, Artificial Sequence
  Synthetic
cgcggaggttgtagccaccc

SEQ ID NO: 31653 - DNA, 20 bp, Artificial Sequence
  Synthetic
tggctacaacctccgcgccc

SEQ ID NO: 31654 - DNA, 20 bp, Artificial Sequence
  Synthetic
aacctccgcgccctggctga

SEQ ID NO: 31655 - DNA, 20 bp, Artificial Sequence
  Synthetic
cgccttcagccagggcgcgg

SEQ ID NO: 31656 - DNA, 20 bp, Artificial Sequence
  Synthetic
tgacgccttcagccagggcg

SEQ ID NO: 31657 - DNA, 20 bp, Artificial Sequence
  Synthetic
agcactgacgccttcagcca

SEQ ID NO: 31658 - DNA, 20 bp, Artificial Sequence
  Synthetic
aagcactgacgccttcagcc

SEQ ID NO: 31659 - DNA, 20 bp, Artificial Sequence
  Synthetic
tgcttcgctccacacccttc

SEQ ID NO: 31660 - DNA, 20 bp, Artificial Sequence
  Synthetic
gcttcgctccacacccttct

SEQ ID NO: 31661 - DNA, 20 bp, Artificial Sequence
  Synthetic
aagggtctcccagaagggtg

SEQ ID NO: 31662 - DNA, 20 bp, Artificial Sequence
  Synthetic
ctgaagcaccagtgctcctg

SEQ ID NO: 31663 - DNA, 20 bp, Artificial Sequence
  Synthetic
gctcctgcggtgacaacagc

SEQ ID NO: 31664 - DNA, 20 bp, Artificial Sequence
  Synthetic
gtgcctgctgttgtcaccgc

SEQ ID NO: 31665 - DNA, 20 bp, Artificial Sequence
  Synthetic
cggtgacaacagcaggcacc

SEQ ID NO: 31666 - DNA, 20 bp, Artificial Sequence
  Synthetic
agcaggcacccggagcacgc

SEQ ID NO: 31667 - DNA, 20 bp, Artificial Sequence
  Synthetic
ggatgcggccggcgtgctcc

SEQ ID NO: 31668 - DNA, 20 bp, Artificial Sequence
  Synthetic
tggatgcggccggcgtgctc

SEQ ID NO: 31669 - DNA, 20 bp, Artificial Sequence
  Synthetic
ccagatgctctggatgcggc

SEQ ID NO: 31670 - DNA, 20 bp, Artificial Sequence
  Synthetic
ccggccgcatccagagcatc

SEQ ID NO: 31671 - DNA, 20 bp, Artificial Sequence
  Synthetic
gggaccagatgctctggatg

SEQ ID NO: 31672 - DNA, 20 bp, Artificial Sequence
  Synthetic
gcatccagagcatctggtcc

SEQ ID NO: 31673 - DNA, 20 bp, Artificial Sequence
  Synthetic
gcagccgggaccagatgctc

SEQ ID NO: 31674 - DNA, 20 bp, Artificial Sequence
  Synthetic
gagcatctggtcccggctgc

SEQ ID NO: 31675 - DNA, 20 bp, Artificial Sequence
  Synthetic
tctggtcccggctgcaggag

SEQ ID NO: 31676 - DNA, 20 bp, Artificial Sequence
  Synthetic
ctggtcccggctgcaggagc

SEQ ID NO: 31677 - DNA, 20 bp, Artificial Sequence
  Synthetic
tggtcccggctgcaggagcg

SEQ ID NO: 31678 - DNA, 20 bp, Artificial Sequence
  Synthetic
ggtcccggctgcaggagcgg

SEQ ID NO: 31679 - DNA, 20 bp, Artificial Sequence
  Synthetic
gagcccccgctcctgcagcc

SEQ ID NO: 31680 - DNA, 20 bp, Artificial Sequence
  Synthetic
ggagcccccgctcctgcagc

SEQ ID NO: 31681 - DNA, 20 bp, Artificial Sequence
  Synthetic
ggctgcaggagcgggggctc

SEQ ID NO: 31682 - DNA, 20 bp, Artificial Sequence
  Synthetic
ggggctccggagccagtgtg

SEQ ID NO: 31683 - DNA, 20 bp, Artificial Sequence
  Synthetic
tcctcacctcacactggctc

SEQ ID NO: 31684 - DNA, 20 bp, Artificial Sequence
  Synthetic
cgcgcctcctcacctcacac

SEQ ID NO: 31685 - DNA, 20 bp, Artificial Sequence
  Synthetic
tccccttttcagtgtctccg

SEQ ID NO: 31686 - DNA, 20 bp, Artificial Sequence
  Synthetic
cttttcagtgtctccgaggc

SEQ ID NO: 31687 - DNA, 20 bp, Artificial Sequence
  Synthetic
tcagtgtctccgaggccgga

SEQ ID NO: 31688 - DNA, 20 bp, Artificial Sequence
  Synthetic
ccagggaggccttccggcct

SEQ ID NO: 31689 - DNA, 20 bp, Artificial Sequence
  Synthetic
ccgaggccggaaggcctccc

SEQ ID NO: 31690 - DNA, 20 bp, Artificial Sequence
  Synthetic
gctcttccagggaggccttc

SEQ ID NO: 31691 - DNA, 20 bp, Artificial Sequence
  Synthetic
cgactgcagctcttccaggg

SEQ ID NO: 31692 - DNA, 20 bp, Artificial Sequence
  Synthetic
ctccctggaagagctgcagt

SEQ ID NO: 31693 - DNA, 20 bp, Artificial Sequence
  Synthetic
gaccgactgcagctcttcca

SEQ ID NO: 31694 - DNA, 20 bp, Artificial Sequence
  Synthetic
ggaccgactgcagctcttcc

SEQ ID NO: 31695 - DNA, 20 bp, Artificial Sequence
  Synthetic
tgcagtcggtccactctgag

SEQ ID NO: 31696 - DNA, 20 bp, Artificial Sequence
  Synthetic
ggagcacgtgccgctcagag

SEQ ID NO: 31697 - DNA, 20 bp, Artificial Sequence
  Synthetic
gagcggcacgtgctcctcta

SEQ ID NO: 31698 - DNA, 20 bp, Artificial Sequence
  Synthetic
tgagcgggttggtgccgtag

SEQ ID NO: 31699 - DNA, 20 bp, Artificial Sequence
  Synthetic
tttgaggcggctgagcgggt

SEQ ID NO: 31700 - DNA, 20 bp, Artificial Sequence
  Synthetic
ccagtttgaggcggctgagc

SEQ ID NO: 31701 - DNA, 20 bp, Artificial Sequence
  Synthetic
cccgctcagccgcctcaaac

SEQ ID NO: 31702 - DNA, 20 bp, Artificial Sequence
  Synthetic
tccagtttgaggcggctgag

SEQ ID NO: 31703 - DNA, 20 bp, Artificial Sequence
  Synthetic
agccgcctcaaactggacaa

SEQ ID NO: 31704 - DNA, 20 bp, Artificial Sequence
  Synthetic
gccgcctcaaactggacaac

SEQ ID NO: 31705 - DNA, 20 bp, Artificial Sequence
  Synthetic
tcccgttgtccagtttgagg

SEQ ID NO: 31706 - DNA, 20 bp, Artificial Sequence
  Synthetic
gcttcccgttgtccagtttg

SEQ ID NO: 31707 - DNA, 20 bp, Artificial Sequence
  Synthetic
caaactggacaacgggaagc

SEQ ID NO: 31708 - DNA, 20 bp, Artificial Sequence
  Synthetic
ctggacaacgggaagctggc

SEQ ID NO: 31709 - DNA, 20 bp, Artificial Sequence
  Synthetic
gcctctccccgcagggctcc

SEQ ID NO: 31710 - DNA, 20 bp, Artificial Sequence
  Synthetic
ccgcagggctcctggcacag

SEQ ID NO: 31711 - DNA, 20 bp, Artificial Sequence
  Synthetic
tcacaaacatccgctgtgcc

SEQ ID NO: 31712 - DNA, 20 bp, Artificial Sequence
  Synthetic
atgtttgtgatgctgccctg

SEQ ID NO: 31713 - DNA, 20 bp, Artificial Sequence
  Synthetic
tttgtgatgctgccctgtgg

SEQ ID NO: 31714 - DNA, 20 bp, Artificial Sequence
  Synthetic
ttgtgatgctgccctgtggt

SEQ ID NO: 31715 - DNA, 20 bp, Artificial Sequence
  Synthetic
tgtgatgctgccctgtggtg

SEQ ID NO: 31716 - DNA, 20 bp, Artificial Sequence
  Synthetic
atgctgccctgtggtggggt

SEQ ID NO: 31717 - DNA, 20 bp, Artificial Sequence
  Synthetic
tgctgccctgtggtggggtt

SEQ ID NO: 31718 - DNA, 20 bp, Artificial Sequence
  Synthetic
gctgccctgtggtggggttg

SEQ ID NO: 31719 - DNA, 20 bp, Artificial Sequence
  Synthetic
cttaccccaaccccaccaca

SEQ ID NO: 31720 - DNA, 20 bp, Artificial Sequence
  Synthetic
acttaccccaaccccaccac

SEQ ID NO: 31721 - DNA, 20 bp, Artificial Sequence
  Synthetic
aggtggacactgacaccatc

SEQ ID NO: 31722 - DNA, 20 bp, Artificial Sequence
  Synthetic
ggaatgaagctcattccaga

SEQ ID NO: 31723 - DNA, 20 bp, Artificial Sequence
  Synthetic
attcctccaatgcagcccgc

SEQ ID NO: 31724 - DNA, 20 bp, Artificial Sequence
  Synthetic
ttcctccaatgcagcccgct

SEQ ID NO: 31725 - DNA, 20 bp, Artificial Sequence
  Synthetic
ggcccagcgggctgcattgg

SEQ ID NO: 31726 - DNA, 20 bp, Artificial Sequence
  Synthetic
agcggcccagcgggctgcat

SEQ ID NO: 31727 - DNA, 20 bp, Artificial Sequence
  Synthetic
aatgcagcccgctgggccgc

SEQ ID NO: 31728 - DNA, 20 bp, Artificial Sequence
  Synthetic
gacactgccagcggcccagc

SEQ ID NO: 31729 - DNA, 20 bp, Artificial Sequence
  Synthetic
tgacactgccagcggcccag

SEQ ID NO: 31730 - DNA, 20 bp, Artificial Sequence
  Synthetic
gaggtcagtgacactgccag

SEQ ID NO: 31731 - DNA, 20 bp, Artificial Sequence
  Synthetic
cactgacctcgccttcaaag

SEQ ID NO: 31732 - DNA, 20 bp, Artificial Sequence
  Synthetic
gagaagccactttgaaggcg

SEQ ID NO: 31733 - DNA, 20 bp, Artificial Sequence
  Synthetic
ctcacgagaagccactttga

SEQ ID NO: 31734 - DNA, 20 bp, Artificial Sequence
  Synthetic
agtggcttctcgtgagctaa

SEQ ID NO: 31735 - DNA, 20 bp, Artificial Sequence
  Synthetic
gcttctcgtgagctaaaggt

SEQ ID NO: 31736 - DNA, 20 bp, Artificial Sequence
  Synthetic
tttccagaatggtttcgctg

SEQ ID NO: 31737 - DNA, 20 bp, Artificial Sequence
  Synthetic
gcaccacagcgaaaccattc

SEQ ID NO: 31738 - DNA, 20 bp, Artificial Sequence
  Synthetic
agaatggtttcgctgtggtg

SEQ ID NO: 31739 - DNA, 20 bp, Artificial Sequence
  Synthetic
ttcgctgtggtgcggccccc

SEQ ID NO: 31740 - DNA, 20 bp, Artificial Sequence
  Synthetic
tgatctgcatggtgtcctgg

SEQ ID NO: 31741 - DNA, 20 bp, Artificial Sequence
  Synthetic
atgatctgcatggtgtcctg

SEQ ID NO: 31742 - DNA, 20 bp, Artificial Sequence
  Synthetic
aatgatctgcatggtgtcct

SEQ ID NO: 31743 - DNA, 20 bp, Artificial Sequence
  Synthetic
gaatgatctgcatggtgtcc

SEQ ID NO: 31744 - DNA, 20 bp, Artificial Sequence
  Synthetic
tggctgttgaatgatctgca

SEQ ID NO: 31745 - DNA, 20 bp, Artificial Sequence
  Synthetic
gttgaagaagcagaagcccc

SEQ ID NO: 31746 - DNA, 20 bp, Artificial Sequence
  Synthetic
cttctgcttcttcaactcag

SEQ ID NO: 31747 - DNA, 20 bp, Artificial Sequence
  Synthetic
actcagtggccatcgcctgc

SEQ ID NO: 31748 - DNA, 20 bp, Artificial Sequence
  Synthetic
ttgcagctgccggcaggcga

SEQ ID NO: 31749 - DNA, 20 bp, Artificial Sequence
  Synthetic
ctgctgttgcagctgccggc

SEQ ID NO: 31750 - DNA, 20 bp, Artificial Sequence
  Synthetic
tgctctgctgttgcagctgc

SEQ ID NO: 31751 - DNA, 20 bp, Artificial Sequence
  Synthetic
gcagctgcaacagcagagca

SEQ ID NO: 31752 - DNA, 20 bp, Artificial Sequence
  Synthetic
gtctacaatgaggatcttgc

SEQ ID NO: 31753 - DNA, 20 bp, Artificial Sequence
  Synthetic
gcaagatcctcattgtagac

SEQ ID NO: 31754 - DNA, 20 bp, Artificial Sequence
  Synthetic
caagatcctcattgtagact

SEQ ID NO: 31755 - DNA, 20 bp, Artificial Sequence
  Synthetic
atcctcattgtagactgggt

SEQ ID NO: 31756 - DNA, 20 bp, Artificial Sequence
  Synthetic
cacctacccagtctacaatg

SEQ ID NO: 31757 - DNA, 20 bp, Artificial Sequence
  Synthetic
cctacacaggacgtgcacca

SEQ ID NO: 31758 - DNA, 20 bp, Artificial Sequence
  Synthetic
caggacgtgcaccatggcaa

SEQ ID NO: 31759 - DNA, 20 bp, Artificial Sequence
  Synthetic
tttgctgggtgccgttgcca

SEQ ID NO: 31760 - DNA, 20 bp, Artificial Sequence
  Synthetic
gtcttggtagaaggtttgct

SEQ ID NO: 31761 - DNA, 20 bp, Artificial Sequence
  Synthetic
ggtcttggtagaaggtttgc

SEQ ID NO: 31762 - DNA, 20 bp, Artificial Sequence
  Synthetic
cacactggggtcttggtaga

SEQ ID NO: 31763 - DNA, 20 bp, Artificial Sequence
  Synthetic
tgtagagcacactggggtct

SEQ ID NO: 31764 - DNA, 20 bp, Artificial Sequence
  Synthetic
gggagatgtagagcacactg

SEQ ID NO: 31765 - DNA, 20 bp, Artificial Sequence
  Synthetic
agggagatgtagagcacact

SEQ ID NO: 31766 - DNA, 20 bp, Artificial Sequence
  Synthetic
cagggagatgtagagcacac

SEQ ID NO: 31767 - DNA, 20 bp, Artificial Sequence
  Synthetic
tccctgcatcgccatgacga

SEQ ID NO: 31768 - DNA, 20 bp, Artificial Sequence
  Synthetic
gccgtcgtcatggcgatgca

SEQ ID NO: 31769 - DNA, 20 bp, Artificial Sequence
  Synthetic
tgccgtcgtcatggcgatgc

SEQ ID NO: 31770 - DNA, 20 bp, Artificial Sequence
  Synthetic
ggaagaagttgccgtcgtca

SEQ ID NO: 31771 - DNA, 20 bp, Artificial Sequence
  Synthetic
tgacgacggcaacttcttcc

SEQ ID NO: 31772 - DNA, 20 bp, Artificial Sequence
  Synthetic
gacgacggcaacttcttccc

SEQ ID NO: 31773 - DNA, 20 bp, Artificial Sequence
  Synthetic
acgacggcaacttcttcccg

SEQ ID NO: 31774 - DNA, 20 bp, Artificial Sequence
  Synthetic
ggcaacttcttcccggggag

SEQ ID NO: 31775 - DNA, 20 bp, Artificial Sequence
  Synthetic
gcaacttcttcccggggagt

SEQ ID NO: 31776 - DNA, 20 bp, Artificial Sequence
  Synthetic
caacttcttcccggggagtg

SEQ ID NO: 31777 - DNA, 20 bp, Artificial Sequence
  Synthetic
cttcccggggagtggggctg

SEQ ID NO: 31778 - DNA, 20 bp, Artificial Sequence
  Synthetic
catccacagccccactcccc

SEQ ID NO: 31779 - DNA, 20 bp, Artificial Sequence
  Synthetic
tcatccacagccccactccc

SEQ ID NO: 31780 - DNA, 20 bp, Artificial Sequence
  Synthetic
ggggagtggggctgtggatg

SEQ ID NO: 31781 - DNA, 20 bp, Artificial Sequence
  Synthetic
gcctcctgttttccaggtag

SEQ ID NO: 31782 - DNA, 20 bp, Artificial Sequence
  Synthetic
cctgttttccaggtaggggc

SEQ ID NO: 31783 - DNA, 20 bp, Artificial Sequence
  Synthetic
ttccaggtaggggctggcag

SEQ ID NO: 31784 - DNA, 20 bp, Artificial Sequence
  Synthetic
caccgctgccagcccctacc

SEQ ID NO: 31785 - DNA, 20 bp, Artificial Sequence
  Synthetic
ggtaggggctggcagcggtg

SEQ ID NO: 31786 - DNA, 20 bp, Artificial Sequence
  Synthetic
gtaggggctggcagcggtga

SEQ ID NO: 31787 - DNA, 20 bp, Artificial Sequence
  Synthetic
tgagggcttcaatgtcaatg

SEQ ID NO: 31788 - DNA, 20 bp, Artificial Sequence
  Synthetic
gcttcaatgtcaatgtggcc

SEQ ID NO: 31789 - DNA, 20 bp, Artificial Sequence
  Synthetic
cttcaatgtcaatgtggcct

SEQ ID NO: 31790 - DNA, 20 bp, Artificial Sequence
  Synthetic
aatgtcaatgtggcctgggc

SEQ ID NO: 31791 - DNA, 20 bp, Artificial Sequence
  Synthetic
gtcaatgtggcctgggctgg

SEQ ID NO: 31792 - DNA, 20 bp, Artificial Sequence
  Synthetic
tgtggcctgggctggaggtc

SEQ ID NO: 31793 - DNA, 20 bp, Artificial Sequence
  Synthetic
ggggtccagacctccagccc

SEQ ID NO: 31794 - DNA, 20 bp, Artificial Sequence
  Synthetic
tggaggtctggaccccccca

SEQ ID NO: 31795 - DNA, 20 bp, Artificial Sequence
  Synthetic
ggaggtctggacccccccat

SEQ ID NO: 31796 - DNA, 20 bp, Artificial Sequence
  Synthetic
gaggtctggacccccccatg

SEQ ID NO: 31797 - DNA, 20 bp, Artificial Sequence
  Synthetic
aggtctggacccccccatgg

SEQ ID NO: 31798 - DNA, 20 bp, Artificial Sequence
  Synthetic
actcaggatcccccatgggg

SEQ ID NO: 31799 - DNA, 20 bp, Artificial Sequence
  Synthetic
tactcaggatcccccatggg

SEQ ID NO: 31800 - DNA, 20 bp, Artificial Sequence
  Synthetic
gtactcaggatcccccatgg

SEQ ID NO: 31801 - DNA, 20 bp, Artificial Sequence
  Synthetic
ggtactcaggatcccccatg

SEQ ID NO: 31802 - DNA, 20 bp, Artificial Sequence
  Synthetic
aggtactcaggatcccccat

SEQ ID NO: 31803 - DNA, 20 bp, Artificial Sequence
  Synthetic
caggtactcaggatccccca

SEQ ID NO: 31804 - DNA, 20 bp, Artificial Sequence
  Synthetic
catgggggatcctgagtacc

SEQ ID NO: 31805 - DNA, 20 bp, Artificial Sequence
  Synthetic
ctgaaagcagccaggtactc

SEQ ID NO: 31806 - DNA, 20 bp, Artificial Sequence
  Synthetic
ctgagtacctggctgctttc

SEQ ID NO: 31807 - DNA, 20 bp, Artificial Sequence
  Synthetic
gcacgtacctgaaagcagcc

SEQ ID NO: 31808 - DNA, 20 bp, Artificial Sequence
  Synthetic
ggagagaactctcgggcgat

SEQ ID NO: 31809 - DNA, 20 bp, Artificial Sequence
  Synthetic
tggagagaactctcgggcga

SEQ ID NO: 31810 - DNA, 20 bp, Artificial Sequence
  Synthetic
taggtctggagagaactctc

SEQ ID NO: 31811 - DNA, 20 bp, Artificial Sequence
  Synthetic
ctaggtctggagagaactct

SEQ ID NO: 31812 - DNA, 20 bp, Artificial Sequence
  Synthetic
gttctctccagacctagtcc

SEQ ID NO: 31813 - DNA, 20 bp, Artificial Sequence
  Synthetic
gcagacaccaggactaggtc

SEQ ID NO: 31814 - DNA, 20 bp, Artificial Sequence
  Synthetic
gacctagtcctggtgtctgc

SEQ ID NO: 31815 - DNA, 20 bp, Artificial Sequence
  Synthetic
atccagcagacaccaggact

SEQ ID NO: 31816 - DNA, 20 bp, Artificial Sequence
  Synthetic
catcaaatccagcagacacc

SEQ ID NO: 31817 - DNA, 20 bp, Artificial Sequence
  Synthetic
tgctggatttgatgctgctg

SEQ ID NO: 31818 - DNA, 20 bp, Artificial Sequence
  Synthetic
gctggatttgatgctgctga

SEQ ID NO: 31819 - DNA, 20 bp, Artificial Sequence
  Synthetic
tgatgctgctgagggtcacc

SEQ ID NO: 31820 - DNA, 20 bp, Artificial Sequence
  Synthetic
tgagggtcacccggccccac

SEQ ID NO: 31821 - DNA, 20 bp, Artificial Sequence
  Synthetic
gagggtcacccggccccact

SEQ ID NO: 31822 - DNA, 20 bp, Artificial Sequence
  Synthetic
ggtcacccggccccactggg

SEQ ID NO: 31823 - DNA, 20 bp, Artificial Sequence
  Synthetic
ggtagccacccagtggggcc

SEQ ID NO: 31824 - DNA, 20 bp, Artificial Sequence
  Synthetic
tggtagccacccagtggggc

SEQ ID NO: 31825 - DNA, 20 bp, Artificial Sequence
  Synthetic
aacatggtagccacccagtg

SEQ ID NO: 31826 - DNA, 20 bp, Artificial Sequence
  Synthetic
aaacatggtagccacccagt

SEQ ID NO: 31827 - DNA, 20 bp, Artificial Sequence
  Synthetic
gaaacatggtagccacccag

SEQ ID NO: 31828 - DNA, 20 bp, Artificial Sequence
  Synthetic
ccttacatttggcagaaaca

SEQ ID NO: 31829 - DNA, 20 bp, Artificial Sequence
  Synthetic
agctgaggctcccttacatt

SEQ ID NO: 31830 - DNA, 20 bp, Artificial Sequence
  Synthetic
ccctcccaacctctaggttt

SEQ ID NO: 31831 - DNA, 20 bp, Artificial Sequence
  Synthetic
gacgcagcaactgatgaacc

SEQ ID NO: 31832 - DNA, 20 bp, Artificial Sequence
  Synthetic
cagcaactgatgaacctggc

SEQ ID NO: 31833 - DNA, 20 bp, Artificial Sequence
  Synthetic
caactgatgaacctggcagg

SEQ ID NO: 31834 - DNA, 20 bp, Artificial Sequence
  Synthetic
gaacctggcaggaggcgcag

SEQ ID NO: 31835 - DNA, 20 bp, Artificial Sequence
  Synthetic
gcaccactgcgcctcctgcc

SEQ ID NO: 31836 - DNA, 20 bp, Artificial Sequence
  Synthetic
ggcaggaggcgcagtggtgc

SEQ ID NO: 31837 - DNA, 20 bp, Artificial Sequence
  Synthetic
aggcgcagtggtgctggcct

SEQ ID NO: 31838 - DNA, 20 bp, Artificial Sequence
  Synthetic
cgcagtggtgctggccttgg

SEQ ID NO: 31839 - DNA, 20 bp, Artificial Sequence
  Synthetic
gcagtggtgctggccttgga

SEQ ID NO: 31840 - DNA, 20 bp, Artificial Sequence
  Synthetic
gtggtgctggccttggaggg

SEQ ID NO: 31841 - DNA, 20 bp, Artificial Sequence
  Synthetic
gaggtcatggccaccctcca

SEQ ID NO: 31842 - DNA, 20 bp, Artificial Sequence
  Synthetic
cacagatggctgtgaggtca

SEQ ID NO: 31843 - DNA, 20 bp, Artificial Sequence
  Synthetic
aggcgtcacagatggctgtg

SEQ ID NO: 31844 - DNA, 20 bp, Artificial Sequence
  Synthetic
agccatctgtgacgcctctg

SEQ ID NO: 31845 - DNA, 20 bp, Artificial Sequence
  Synthetic
ggcctcagaggcgtcacaga

SEQ ID NO: 31846 - DNA, 20 bp, Artificial Sequence
  Synthetic
tgacgcctctgaggcctgtg

SEQ ID NO: 31847 - DNA, 20 bp, Artificial Sequence
  Synthetic
agcagccacacaggcctcag

SEQ ID NO: 31848 - DNA, 20 bp, Artificial Sequence
  Synthetic
ggcctgtgtggctgctcttc

SEQ ID NO: 31849 - DNA, 20 bp, Artificial Sequence
  Synthetic
gcctgtgtggctgctcttct

SEQ ID NO: 31850 - DNA, 20 bp, Artificial Sequence
  Synthetic
acccagaagagcagccacac

SEQ ID NO: 31851 - DNA, 20 bp, Artificial Sequence
  Synthetic
tgtcagtatgtgtgactccc

SEQ ID NO: 31852 - DNA, 20 bp, Artificial Sequence
  Synthetic
ccgtttggggatcttggcca

SEQ ID NO: 31853 - DNA, 20 bp, Artificial Sequence
  Synthetic
ccctggccaagatccccaaa

SEQ ID NO: 31854 - DNA, 20 bp, Artificial Sequence
  Synthetic
cccgtttggggatcttggcc

SEQ ID NO: 31855 - DNA, 20 bp, Artificial Sequence
  Synthetic
cctggccaagatccccaaac

SEQ ID NO: 31856 - DNA, 20 bp, Artificial Sequence
  Synthetic
ccttacccgtttggggatct

SEQ ID NO: 31857 - DNA, 20 bp, Artificial Sequence
  Synthetic
cgacttcccttacccgtttg

SEQ ID NO: 31858 - DNA, 20 bp, Artificial Sequence
  Synthetic
ccgacttcccttacccgttt

SEQ ID NO: 31859 - DNA, 20 bp, Artificial Sequence
  Synthetic
cccgacttcccttacccgtt

SEQ ID NO: 31860 - DNA, 20 bp, Artificial Sequence
  Synthetic
ctgatgtttttaggccagta

SEQ ID NO: 31861 - DNA, 20 bp, Artificial Sequence
  Synthetic
aatcaaagaatgcaccatac

SEQ ID NO: 31862 - DNA, 20 bp, Artificial Sequence
  Synthetic
atgcactgcataagcagatg

SEQ ID NO: 31863 - DNA, 20 bp, Artificial Sequence
  Synthetic
taggatagttaagcctaaag

SEQ ID NO: 31864 - DNA, 20 bp, Artificial Sequence
  Synthetic
taagcctaaagtggcctcca

SEQ ID NO: 31865 - DNA, 20 bp, Artificial Sequence
  Synthetic
gcctaaagtggcctccatgg

SEQ ID NO: 31866 - DNA, 20 bp, Artificial Sequence
  Synthetic
tcctccatggaggccacttt

SEQ ID NO: 31867 - DNA, 20 bp, Artificial Sequence
  Synthetic
agtggcctccatggaggaga

SEQ ID NO: 31868 - DNA, 20 bp, Artificial Sequence
  Synthetic
ggtggccatctcctccatgg

SEQ ID NO: 31869 - DNA, 20 bp, Artificial Sequence
  Synthetic
gaaggtggccatctcctcca

SEQ ID NO: 31870 - DNA, 20 bp, Artificial Sequence
  Synthetic
ataagcatcagtgtggaagg

SEQ ID NO: 31871 - DNA, 20 bp, Artificial Sequence
  Synthetic
cagataagcatcagtgtgga

SEQ ID NO: 31872 - DNA, 20 bp, Artificial Sequence
  Synthetic
gctgcagataagcatcagtg

SEQ ID NO: 31873 - DNA, 20 bp, Artificial Sequence
  Synthetic
ttatctgcagcatctccaga

SEQ ID NO: 31874 - DNA, 20 bp, Artificial Sequence
  Synthetic
tctccagaaggtcagccaag

SEQ ID NO: 31875 - DNA, 20 bp, Artificial Sequence
  Synthetic
ctccagaaggtcagccaaga

SEQ ID NO: 31876 - DNA, 20 bp, Artificial Sequence
  Synthetic
cgccctcttggctgaccttc

SEQ ID NO: 31877 - DNA, 20 bp, Artificial Sequence
  Synthetic
gatgatcatcatcgccctct

SEQ ID NO: 31878 - DNA, 20 bp, Artificial Sequence
  Synthetic
agagggcgatgatgatcatc

SEQ ID NO: 31879 - DNA, 20 bp, Artificial Sequence
  Synthetic
catccggactccatagaata

SEQ ID NO: 31880 - DNA, 20 bp, Artificial Sequence
  Synthetic
atccggactccatagaatat

SEQ ID NO: 31881 - DNA, 20 bp, Artificial Sequence
  Synthetic
agcccatattctatggagtc

SEQ ID NO: 31882 - DNA, 20 bp, Artificial Sequence
  Synthetic
gactccatagaatatgggct

SEQ ID NO: 31883 - DNA, 20 bp, Artificial Sequence
  Synthetic
tttacctagcccatattcta

SEQ ID NO: 31884 - DNA, 20 bp, Artificial Sequence
  Synthetic
tatgactgcccagccactga

SEQ ID NO: 31885 - DNA, 20 bp, Artificial Sequence
  Synthetic
atgactgcccagccactgaa

SEQ ID NO: 31886 - DNA, 20 bp, Artificial Sequence
  Synthetic
caaatatcccttcagtggct

SEQ ID NO: 31887 - DNA, 20 bp, Artificial Sequence
  Synthetic
tcaaatatcccttcagtggc

SEQ ID NO: 31888 - DNA, 20 bp, Artificial Sequence
  Synthetic
atagtcaaatatcccttcag

SEQ ID NO: 31889 - DNA, 20 bp, Artificial Sequence
  Synthetic
tttgactatgcagcagctat

SEQ ID NO: 31890 - DNA, 20 bp, Artificial Sequence
  Synthetic
gactatgcagcagctatagg

SEQ ID NO: 31891 - DNA, 20 bp, Artificial Sequence
  Synthetic
actatgcagcagctatagga

SEQ ID NO: 31892 - DNA, 20 bp, Artificial Sequence
  Synthetic
ctatgcagcagctataggag

SEQ ID NO: 31893 - DNA, 20 bp, Artificial Sequence
  Synthetic
gctgcccaatgcctgattga

SEQ ID NO: 31894 - DNA, 20 bp, Artificial Sequence
  Synthetic
cattccgtcaatcaggcatt

SEQ ID NO: 31895 - DNA, 20 bp, Artificial Sequence
  Synthetic
acattccgtcaatcaggcat

SEQ ID NO: 31896 - DNA, 20 bp, Artificial Sequence
  Synthetic
ctttgcacattccgtcaatc

SEQ ID NO: 31897 - DNA, 20 bp, Artificial Sequence
  Synthetic
tgtgcaaagtagcaattaac

SEQ ID NO: 31898 - DNA, 20 bp, Artificial Sequence
  Synthetic
aaagtagcaattaactggtc

SEQ ID NO: 31899 - DNA, 20 bp, Artificial Sequence
  Synthetic
gtagcaattaactggtctgg

SEQ ID NO: 31900 - DNA, 20 bp, Artificial Sequence
  Synthetic
tagcaattaactggtctgga

SEQ ID NO: 31901 - DNA, 20 bp, Artificial Sequence
  Synthetic
caattaactggtctggaggg

SEQ ID NO: 31902 - DNA, 20 bp, Artificial Sequence
  Synthetic
tcttacagagatgaagcatc

SEQ ID NO: 31903 - DNA, 20 bp, Artificial Sequence
  Synthetic
ttatctcaatgatgctgtcc

SEQ ID NO: 31904 - DNA, 20 bp, Artificial Sequence
  Synthetic
tatctcaatgatgctgtcct

SEQ ID NO: 31905 - DNA, 20 bp, Artificial Sequence
  Synthetic
gtcgcaatcgtaatattccc

SEQ ID NO: 31906 - DNA, 20 bp, Artificial Sequence
  Synthetic
tgggaatattacgattgcga

SEQ ID NO: 31907 - DNA, 20 bp, Artificial Sequence
  Synthetic
atttgagcgtattctctacg

SEQ ID NO: 31908 - DNA, 20 bp, Artificial Sequence
  Synthetic
gcgtattctctacgtggatt

SEQ ID NO: 31909 - DNA, 20 bp, Artificial Sequence
  Synthetic
gtggatttggatctgcacca

SEQ ID NO: 31910 - DNA, 20 bp, Artificial Sequence
  Synthetic
ttggatctgcaccatggaga

SEQ ID NO: 31911 - DNA, 20 bp, Artificial Sequence
  Synthetic
caaagggcttaccatctcca

SEQ ID NO: 31912 - DNA, 20 bp, Artificial Sequence
  Synthetic
ggacacggtcatgactttgg

SEQ ID NO: 31913 - DNA, 20 bp, Artificial Sequence
  Synthetic
cagggacacggtcatgactt

SEQ ID NO: 31914 - DNA, 20 bp, Artificial Sequence
  Synthetic
ggagaatttgtgcagggaca

SEQ ID NO: 31915 - DNA, 20 bp, Artificial Sequence
  Synthetic
tccctgcacaaattctcccc

SEQ ID NO: 31916 - DNA, 20 bp, Artificial Sequence
  Synthetic
tcctggggagaatttgtgca

SEQ ID NO: 31917 - DNA, 20 bp, Artificial Sequence
  Synthetic
atcctggggagaatttgtgc

SEQ ID NO: 31918 - DNA, 20 bp, Artificial Sequence
  Synthetic
ttctccccaggatttttccc

SEQ ID NO: 31919 - DNA, 20 bp, Artificial Sequence
  Synthetic
cttgcctgggaaaaatcctg

SEQ ID NO: 31920 - DNA, 20 bp, Artificial Sequence
  Synthetic
acttgcctgggaaaaatcct

SEQ ID NO: 31921 - DNA, 20 bp, Artificial Sequence
  Synthetic
cacttgcctgggaaaaatcc

SEQ ID NO: 31922 - DNA, 20 bp, Artificial Sequence
  Synthetic
ctcttctcttttataggaac

SEQ ID NO: 31923 - DNA, 20 bp, Artificial Sequence
  Synthetic
acaggtgacgtgtctgatgt

SEQ ID NO: 31924 - DNA, 20 bp, Artificial Sequence
  Synthetic
gacgtgtctgatgttggcct

SEQ ID NO: 31925 - DNA, 20 bp, Artificial Sequence
  Synthetic
acgtgtctgatgttggccta

SEQ ID NO: 31926 - DNA, 20 bp, Artificial Sequence
  Synthetic
gtctgatgttggcctaggga

SEQ ID NO: 31927 - DNA, 20 bp, Artificial Sequence
  Synthetic
tctgatgttggcctagggaa

SEQ ID NO: 31928 - DNA, 20 bp, Artificial Sequence
  Synthetic
atgttggcctagggaaggga

SEQ ID NO: 31929 - DNA, 20 bp, Artificial Sequence
  Synthetic
tgtagtaccgtcccttccct

SEQ ID NO: 31930 - DNA, 20 bp, Artificial Sequence
  Synthetic
cagtgtaaatgtgcccattc

SEQ ID NO: 31931 - DNA, 20 bp, Artificial Sequence
  Synthetic
gtaaatgtgcccattcagga

SEQ ID NO: 31932 - DNA, 20 bp, Artificial Sequence
  Synthetic
tcttgtatgccatcctgaat

SEQ ID NO: 31933 - DNA, 20 bp, Artificial Sequence
  Synthetic
atcttgtatgccatcctgaa

SEQ ID NO: 31934 - DNA, 20 bp, Artificial Sequence
  Synthetic
aatattaccagatctgtgaa

SEQ ID NO: 31935 - DNA, 20 bp, Artificial Sequence
  Synthetic
tgccatacctttcacagatc

SEQ ID NO: 31936 - DNA, 20 bp, Artificial Sequence
  Synthetic
tattttatatagtgtactaa

SEQ ID NO: 31937 - DNA, 20 bp, Artificial Sequence
  Synthetic
ctgctttgggattaaaggct

SEQ ID NO: 31938 - DNA, 20 bp, Artificial Sequence
  Synthetic
agcctttaatcccaaagcag

SEQ ID NO: 31939 - DNA, 20 bp, Artificial Sequence
  Synthetic
gaccactgctttgggattaa

SEQ ID NO: 31940 - DNA, 20 bp, Artificial Sequence
  Synthetic
agctgtaagaccactgcttt

SEQ ID NO: 31941 - DNA, 20 bp, Artificial Sequence
  Synthetic
cagctgtaagaccactgctt

SEQ ID NO: 31942 - DNA, 20 bp, Artificial Sequence
  Synthetic
caaagcagtggtcttacagc

SEQ ID NO: 31943 - DNA, 20 bp, Artificial Sequence
  Synthetic
aaagcagtggtcttacagct

SEQ ID NO: 31944 - DNA, 20 bp, Artificial Sequence
  Synthetic
ctgggagctgacacaatagc

SEQ ID NO: 31945 - DNA, 20 bp, Artificial Sequence
  Synthetic
tgggagctgacacaatagct

SEQ ID NO: 31946 - DNA, 20 bp, Artificial Sequence
  Synthetic
gggagctgacacaatagctg

SEQ ID NO: 31947 - DNA, 20 bp, Artificial Sequence
  Synthetic
gtcatgttaaaggagcacat

SEQ ID NO: 31948 - DNA, 20 bp, Artificial Sequence
  Synthetic
agtcatgttaaaggagcaca

SEQ ID NO: 31949 - DNA, 20 bp, Artificial Sequence
  Synthetic
ctcctttaacatgactccag

SEQ ID NO: 31950 - DNA, 20 bp, Artificial Sequence
  Synthetic
tcctttaacatgactccagt

SEQ ID NO: 31951 - DNA, 20 bp, Artificial Sequence
  Synthetic
tcccactggagtcatgttaa

SEQ ID NO: 31952 - DNA, 20 bp, Artificial Sequence
  Synthetic
aacatgactccagtgggaat

SEQ ID NO: 31953 - DNA, 20 bp, Artificial Sequence
  Synthetic
agacacttgccaattcccac

SEQ ID NO: 31954 - DNA, 20 bp, Artificial Sequence
  Synthetic
gtcttaagtacatccttcaa

SEQ ID NO: 31955 - DNA, 20 bp, Artificial Sequence
  Synthetic
gtacatccttcaatggcagt

SEQ ID NO: 31956 - DNA, 20 bp, Artificial Sequence
  Synthetic
gtgttgccaactgccattga

SEQ ID NO: 31957 - DNA, 20 bp, Artificial Sequence
  Synthetic
gcagttggcaacactcattt

SEQ ID NO: 31958 - DNA, 20 bp, Artificial Sequence
  Synthetic
cagttggcaacactcatttt

SEQ ID NO: 31959 - DNA, 20 bp, Artificial Sequence
  Synthetic
ttggcaacactcattttggg

SEQ ID NO: 31960 - DNA, 20 bp, Artificial Sequence
  Synthetic
gcaacactcattttgggagg

SEQ ID NO: 31961 - DNA, 20 bp, Artificial Sequence
  Synthetic
aggctataaccttgccaaca

SEQ ID NO: 31962 - DNA, 20 bp, Artificial Sequence
  Synthetic
agcatcgagccgtgttggca

SEQ ID NO: 31963 - DNA, 20 bp, Artificial Sequence
  Synthetic
ttgccaacacggctcgatgc

SEQ ID NO: 31964 - DNA, 20 bp, Artificial Sequence
  Synthetic
tgtccagcatcgagccgtgt

SEQ ID NO: 31965 - DNA, 20 bp, Artificial Sequence
  Synthetic
cgatgctggacatacttgac

SEQ ID NO: 31966 - DNA, 20 bp, Artificial Sequence
  Synthetic
gatgctggacatacttgacc

SEQ ID NO: 31967 - DNA, 20 bp, Artificial Sequence
  Synthetic
atgctggacatacttgaccg

SEQ ID NO: 31968 - DNA, 20 bp, Artificial Sequence
  Synthetic
tacttgaccggggtcatcct

SEQ ID NO: 31969 - DNA, 20 bp, Artificial Sequence
  Synthetic
tgttttccctaggatgaccc

SEQ ID NO: 31970 - DNA, 20 bp, Artificial Sequence
  Synthetic
acggacaacagggtccacca

SEQ ID NO: 31971 - DNA, 20 bp, Artificial Sequence
  Synthetic
attgcttctcacggacaaca

SEQ ID NO: 31972 - DNA, 20 bp, Artificial Sequence
  Synthetic
aattgcttctcacggacaac

SEQ ID NO: 31973 - DNA, 20 bp, Artificial Sequence
  Synthetic
cctgctgcaattgcttctca

SEQ ID NO: 31974 - DNA, 20 bp, Artificial Sequence
  Synthetic
ccgtgagaagcaattgcagc

SEQ ID NO: 31975 - DNA, 20 bp, Artificial Sequence
  Synthetic
tctggatttgttgctgctgc

SEQ ID NO: 31976 - DNA, 20 bp, Artificial Sequence
  Synthetic
ctgctatcagaagctgcttc

SEQ ID NO: 31977 - DNA, 20 bp, Artificial Sequence
  Synthetic
aacagcatgagaacttgaca

SEQ ID NO: 31978 - DNA, 20 bp, Artificial Sequence
  Synthetic
gaacttgacacggcagcacc

SEQ ID NO: 31979 - DNA, 20 bp, Artificial Sequence
  Synthetic
gcagcaccaggctcagcttc

SEQ ID NO: 31980 - DNA, 20 bp, Artificial Sequence
  Synthetic
tatgctcctgaagctgagcc

SEQ ID NO: 31981 - DNA, 20 bp, Artificial Sequence
  Synthetic
tcagcttcaggagcatatca

SEQ ID NO: 31982 - DNA, 20 bp, Artificial Sequence
  Synthetic
ctcttctcgcaagttgcaac

SEQ ID NO: 31983 - DNA, 20 bp, Artificial Sequence
  Synthetic
gagttcttgttgctgtttta

SEQ ID NO: 31984 - DNA, 20 bp, Artificial Sequence
  Synthetic
gcaacaagaactcctagaaa

SEQ ID NO: 31985 - DNA, 20 bp, Artificial Sequence
  Synthetic
ccagtttctgctccttttct

SEQ ID NO: 31986 - DNA, 20 bp, Artificial Sequence
  Synthetic
cctagaaaaggagcagaaac

SEQ ID NO: 31987 - DNA, 20 bp, Artificial Sequence
  Synthetic
agcagaaactggagcagcag

SEQ ID NO: 31988 - DNA, 20 bp, Artificial Sequence
  Synthetic
ggagcagcagaggcaagaac

SEQ ID NO: 31989 - DNA, 20 bp, Artificial Sequence
  Synthetic
ggcaagaacaggaagtagag

SEQ ID NO: 31990 - DNA, 20 bp, Artificial Sequence
  Synthetic
aggtggacagtgacaccatt

SEQ ID NO: 31991 - DNA, 20 bp, Artificial Sequence
  Synthetic
tcttcagcgtgatggccagg

SEQ ID NO: 31992 - DNA, 20 bp, Artificial Sequence
  Synthetic
cctgctgggtaccgtttcca

SEQ ID NO: 31993 - DNA, 20 bp, Artificial Sequence
  Synthetic
ccatggaaacggtacccagc

SEQ ID NO: 31994 - DNA, 20 bp, Artificial Sequence
  Synthetic
ttatattgtacccttctcca

SEQ ID NO: 31995 - DNA, 20 bp, Artificial Sequence
  Synthetic
agcatgctcagggtgggtgg

SEQ ID NO: 31996 - DNA, 20 bp, Artificial Sequence
  Synthetic
accacccaccctgagcatgc

SEQ ID NO: 31997 - DNA, 20 bp, Artificial Sequence
  Synthetic
tccagcatgctcagggtggg

SEQ ID NO: 31998 - DNA, 20 bp, Artificial Sequence
  Synthetic
tcgtccagcatgctcagggt

SEQ ID NO: 31999 - DNA, 20 bp, Artificial Sequence
  Synthetic
ttcgtccagcatgctcaggg

SEQ ID NO: 32000 - DNA, 20 bp, Artificial Sequence
  Synthetic
gtattcgtccagcatgctca

SEQ ID NO: 32001 - DNA, 20 bp, Artificial Sequence
  Synthetic
tgtattcgtccagcatgctc

SEQ ID NO: 32002 - DNA, 20 bp, Artificial Sequence
  Synthetic
ctggacgaatacagagtatc

SEQ ID NO: 32003 - DNA, 20 bp, Artificial Sequence
  Synthetic
tggtcacgactgcaagaaac

SEQ ID NO: 32004 - DNA, 20 bp, Artificial Sequence
  Synthetic
ggtcacgactgcaagaaact

SEQ ID NO: 32005 - DNA, 20 bp, Artificial Sequence
  Synthetic
tgggctgctaaataaatgtg

SEQ ID NO: 32006 - DNA, 20 bp, Artificial Sequence
  Synthetic
tcaaggtcgaaaagccagcc

SEQ ID NO: 32007 - DNA, 20 bp, Artificial Sequence
  Synthetic
aggtcgaaaagccagcctgg

SEQ ID NO: 32008 - DNA, 20 bp, Artificial Sequence
  Synthetic
aagctgtatttcctccaggc

SEQ ID NO: 32009 - DNA, 20 bp, Artificial Sequence
  Synthetic
gaacaagctgtatttcctcc

SEQ ID NO: 32010 - DNA, 20 bp, Artificial Sequence
  Synthetic
gaacatcactcactgttgta

SEQ ID NO: 32011 - DNA, 20 bp, Artificial Sequence
  Synthetic
gttgtatggcaccaaccccc

SEQ ID NO: 32012 - DNA, 20 bp, Artificial Sequence
  Synthetic
tatggcaccaaccccctgga

SEQ ID NO: 32013 - DNA, 20 bp, Artificial Sequence
  Synthetic
cttctgtccgtccagggggt

SEQ ID NO: 32014 - DNA, 20 bp, Artificial Sequence
  Synthetic
ccagcttctgtccgtccagg

SEQ ID NO: 32015 - DNA, 20 bp, Artificial Sequence
  Synthetic
ccccctggacggacagaagc

SEQ ID NO: 32016 - DNA, 20 bp, Artificial Sequence
  Synthetic
tccagcttctgtccgtccag

SEQ ID NO: 32017 - DNA, 20 bp, Artificial Sequence
  Synthetic
gtccagcttctgtccgtcca

SEQ ID NO: 32018 - DNA, 20 bp, Artificial Sequence
  Synthetic
ggtccagcttctgtccgtcc

SEQ ID NO: 32019 - DNA, 20 bp, Artificial Sequence
  Synthetic
acggacagaagctggacccc

SEQ ID NO: 32020 - DNA, 20 bp, Artificial Sequence
  Synthetic
ctggaccccaggatactcct

SEQ ID NO: 32021 - DNA, 20 bp, Artificial Sequence
  Synthetic
acagacctaggagtatcctg

SEQ ID NO: 32022 - DNA, 20 bp, Artificial Sequence
  Synthetic
tacagacctaggagtatcct

SEQ ID NO: 32023 - DNA, 20 bp, Artificial Sequence
  Synthetic
gtacagacctaggagtatcc

SEQ ID NO: 32024 - DNA, 20 bp, Artificial Sequence
  Synthetic
aagtccaccacaaggtaatg

SEQ ID NO: 32025 - DNA, 20 bp, Artificial Sequence
  Synthetic
tcattaccttgtggtggact

SEQ ID NO: 32026 - DNA, 20 bp, Artificial Sequence
  Synthetic
cattaccttgtggtggactt

SEQ ID NO: 32027 - DNA, 20 bp, Artificial Sequence
  Synthetic
attaccttgtggtggacttg

SEQ ID NO: 32028 - DNA, 20 bp, Artificial Sequence
  Synthetic
cttaccccaagtccaccaca

SEQ ID NO: 32029 - DNA, 20 bp, Artificial Sequence
  Synthetic
cgagtgtagctcattccaaa

SEQ ID NO: 32030 - DNA, 20 bp, Artificial Sequence
  Synthetic
tggaatgagctacactcgtc

SEQ ID NO: 32031 - DNA, 20 bp, Artificial Sequence
  Synthetic
ctcgtccggtgctgcacgca

SEQ ID NO: 32032 - DNA, 20 bp, Artificial Sequence
  Synthetic
aacagccatgcgtgcagcac

SEQ ID NO: 32033 - DNA, 20 bp, Artificial Sequence
  Synthetic
ggtgctgcacgcatggctgt

SEQ ID NO: 32034 - DNA, 20 bp, Artificial Sequence
  Synthetic
tgttggctgtgtcatcgagc

SEQ ID NO: 32035 - DNA, 20 bp, Artificial Sequence
  Synthetic
catcgagctggcttccaaag

SEQ ID NO: 32036 - DNA, 20 bp, Artificial Sequence
  Synthetic
ctggcttccaaagtggcctc

SEQ ID NO: 32037 - DNA, 20 bp, Artificial Sequence
  Synthetic
cagctctcctgaggccactt

SEQ ID NO: 32038 - DNA, 20 bp, Artificial Sequence
  Synthetic
agtggcctcaggagagctga

SEQ ID NO: 32039 - DNA, 20 bp, Artificial Sequence
  Synthetic
cctcaccttcagctctcctg

SEQ ID NO: 32040 - DNA, 20 bp, Artificial Sequence
  Synthetic
agaatgggtttgctgttgtg

SEQ ID NO: 32041 - DNA, 20 bp, Artificial Sequence
  Synthetic
tttgctgttgtgaggccccc

SEQ ID NO: 32042 - DNA, 20 bp, Artificial Sequence
  Synthetic
ttcttcagcgtgatggccag

SEQ ID NO: 32043 - DNA, 20 bp, Artificial Sequence
  Synthetic
attcttcagcgtgatggcca

SEQ ID NO: 32044 - DNA, 20 bp, Artificial Sequence
  Synthetic
gattcttcagcgtgatggcc

SEQ ID NO: 32045 - DNA, 20 bp, Artificial Sequence
  Synthetic
ctgtggattcttcagcgtga

SEQ ID NO: 32046 - DNA, 20 bp, Artificial Sequence
  Synthetic
ccctggtacttacatggctg

SEQ ID NO: 32047 - DNA, 20 bp, Artificial Sequence
  Synthetic
ttggtctctcaagtatttgg

SEQ ID NO: 32048 - DNA, 20 bp, Artificial Sequence
  Synthetic
tagttggtctctcaagtatt

SEQ ID NO: 32049 - DNA, 20 bp, Artificial Sequence
  Synthetic
atatcttgcttatatttagt

SEQ ID NO: 32050 - DNA, 20 bp, Artificial Sequence
  Synthetic
caagatattgattgtagatc

SEQ ID NO: 32051 - DNA, 20 bp, Artificial Sequence
  Synthetic
tccctgtaggatgttcacca

SEQ ID NO: 32052 - DNA, 20 bp, Artificial Sequence
  Synthetic
taggatgttcaccatggaaa

SEQ ID NO: 32053 - DNA, 20 bp, Artificial Sequence
  Synthetic
gtcagcataaaaggcctgct

SEQ ID NO: 32054 - DNA, 20 bp, Artificial Sequence
  Synthetic
ggtcagcataaaaggcctgc

SEQ ID NO: 32055 - DNA, 20 bp, Artificial Sequence
  Synthetic
gatgctggggtcagcataaa

SEQ ID NO: 32056 - DNA, 20 bp, Artificial Sequence
  Synthetic
gtgaaatgtacaggatgctg

SEQ ID NO: 32057 - DNA, 20 bp, Artificial Sequence
  Synthetic
agtgaaatgtacaggatgct

SEQ ID NO: 32058 - DNA, 20 bp, Artificial Sequence
  Synthetic
gagtgaaatgtacaggatgc

SEQ ID NO: 32059 - DNA, 20 bp, Artificial Sequence
  Synthetic
agcgatggagtgaaatgtac

SEQ ID NO: 32060 - DNA, 20 bp, Artificial Sequence
  Synthetic
tcactccatcgctatgatga

SEQ ID NO: 32061 - DNA, 20 bp, Artificial Sequence
  Synthetic
cactccatcgctatgatgaa

SEQ ID NO: 32062 - DNA, 20 bp, Artificial Sequence
  Synthetic
agttcccttcatcatagcga

SEQ ID NO: 32063 - DNA, 20 bp, Artificial Sequence
  Synthetic
catttggggctccactgcca

SEQ ID NO: 32064 - DNA, 20 bp, Artificial Sequence
  Synthetic
tcatttggggctccactgcc

SEQ ID NO: 32065 - DNA, 20 bp, Artificial Sequence
  Synthetic
tggcagtggagccccaaatg

SEQ ID NO: 32066 - DNA, 20 bp, Artificial Sequence
  Synthetic
aataaaccgaacctcatttg

SEQ ID NO: 32067 - DNA, 20 bp, Artificial Sequence
  Synthetic
aaataaaccgaacctcattt

SEQ ID NO: 32068 - DNA, 20 bp, Artificial Sequence
  Synthetic
gaaataaaccgaacctcatt

SEQ ID NO: 32069 - DNA, 20 bp, Artificial Sequence
  Synthetic
ttctcttcccaggttggaac

SEQ ID NO: 32070 - DNA, 20 bp, Artificial Sequence
  Synthetic
tcccaggttggaacaggcct

SEQ ID NO: 32071 - DNA, 20 bp, Artificial Sequence
  Synthetic
ctccaaggcctgttccaacc

SEQ ID NO: 32072 - DNA, 20 bp, Artificial Sequence
  Synthetic
gttggaacaggccttggaga

SEQ ID NO: 32073 - DNA, 20 bp, Artificial Sequence
  Synthetic
ttggaacaggccttggagaa

SEQ ID NO: 32074 - DNA, 20 bp, Artificial Sequence
  Synthetic
ggtacaatataaatattgcc

SEQ ID NO: 32075 - DNA, 20 bp, Artificial Sequence
  Synthetic
aatataaatattgcctggac

SEQ ID NO: 32076 - DNA, 20 bp, Artificial Sequence
  Synthetic
ataaatattgcctggacagg

SEQ ID NO: 32077 - DNA, 20 bp, Artificial Sequence
  Synthetic
aggatcaaggccacctgtcc

SEQ ID NO: 32078 - DNA, 20 bp, Artificial Sequence
  Synthetic
aggtggccttgatcctccca

SEQ ID NO: 32079 - DNA, 20 bp, Artificial Sequence
  Synthetic
ggtggccttgatcctcccat

SEQ ID NO: 32080 - DNA, 20 bp, Artificial Sequence
  Synthetic
catctcccatgggaggatca

SEQ ID NO: 32081 - DNA, 20 bp, Artificial Sequence
  Synthetic
tactcaacatctcccatggg

SEQ ID NO: 32082 - DNA, 20 bp, Artificial Sequence
  Synthetic
aggtactcaacatctcccat

SEQ ID NO: 32083 - DNA, 20 bp, Artificial Sequence
  Synthetic
aaggtactcaacatctccca

SEQ ID NO: 32084 - DNA, 20 bp, Artificial Sequence
  Synthetic
ttgagtaccttgaagcattc

SEQ ID NO: 32085 - DNA, 20 bp, Artificial Sequence
  Synthetic
gtaccttgaagcattcaggt

SEQ ID NO: 32086 - DNA, 20 bp, Artificial Sequence
  Synthetic
gtaccaacctgaatgcttca

SEQ ID NO: 32087 - DNA, 20 bp, Artificial Sequence
  Synthetic
caggaccatcgtgaagcctg

SEQ ID NO: 32088 - DNA, 20 bp, Artificial Sequence
  Synthetic
tttggccacaggcttcacga

SEQ ID NO: 32089 - DNA, 20 bp, Artificial Sequence
  Synthetic
ggatcaaactctttggccac

SEQ ID NO: 32090 - DNA, 20 bp, Artificial Sequence
  Synthetic
catgtctggatcaaactctt

SEQ ID NO: 32091 - DNA, 20 bp, Artificial Sequence
  Synthetic
caaagagtttgatccagaca

SEQ ID NO: 32092 - DNA, 20 bp, Artificial Sequence
  Synthetic
gcagatactaagaccatgtc

SEQ ID NO: 32093 - DNA, 20 bp, Artificial Sequence
  Synthetic
gacatggtcttagtatctgc

SEQ ID NO: 32094 - DNA, 20 bp, Artificial Sequence
  Synthetic
atctgctggatttgatgcat

SEQ ID NO: 32095 - DNA, 20 bp, Artificial Sequence
  Synthetic
gctggatttgatgcattgga

SEQ ID NO: 32096 - DNA, 20 bp, Artificial Sequence
  Synthetic
gaaggccacacccctcctct

SEQ ID NO: 32097 - DNA, 20 bp, Artificial Sequence
  Synthetic
ggccacacccctcctctagg

SEQ ID NO: 32098 - DNA, 20 bp, Artificial Sequence
  Synthetic
gccacacccctcctctagga

SEQ ID NO: 32099 - DNA, 20 bp, Artificial Sequence
  Synthetic
accctcctagaggaggggtg

SEQ ID NO: 32100 - DNA, 20 bp, Artificial Sequence
  Synthetic
tttgtaccctcctagaggag

SEQ ID NO: 32101 - DNA, 20 bp, Artificial Sequence
  Synthetic
ctttgtaccctcctagagga

SEQ ID NO: 32102 - DNA, 20 bp, Artificial Sequence
  Synthetic
actttgtaccctcctagagg

SEQ ID NO: 32103 - DNA, 20 bp, Artificial Sequence
  Synthetic
gtcactttgtaccctcctag

SEQ ID NO: 32104 - DNA, 20 bp, Artificial Sequence
  Synthetic
tctaggagggtacaaagtga

SEQ ID NO: 32105 - DNA, 20 bp, Artificial Sequence
  Synthetic
gtttgtattatggtaggttt

SEQ ID NO: 32106 - DNA, 20 bp, Artificial Sequence
  Synthetic
gacgaagcaattgatgacat

SEQ ID NO: 32107 - DNA, 20 bp, Artificial Sequence
  Synthetic
caattgatgacattggctga

SEQ ID NO: 32108 - DNA, 20 bp, Artificial Sequence
  Synthetic
gacattggctgatggacgtg

SEQ ID NO: 32109 - DNA, 20 bp, Artificial Sequence
  Synthetic
ggctgatggacgtgtggtgt

SEQ ID NO: 32110 - DNA, 20 bp, Artificial Sequence
  Synthetic
cgtgtggtgttggctctaga

SEQ ID NO: 32111 - DNA, 20 bp, Artificial Sequence
  Synthetic
gtggtgttggctctagaagg

SEQ ID NO: 32112 - DNA, 20 bp, Artificial Sequence
  Synthetic
ggcttctgatgcatcacaga

SEQ ID NO: 32113 - DNA, 20 bp, Artificial Sequence
  Synthetic
tcctagaagggcatttacac

SEQ ID NO: 32114 - DNA, 20 bp, Artificial Sequence
  Synthetic
attttcttgcagcgaattca

SEQ ID NO: 32115 - DNA, 20 bp, Artificial Sequence
  Synthetic
tttttttcctcattaccttg

SEQ ID NO: 32116 - DNA, 20 bp, Artificial Sequence
  Synthetic
ttttcctcattaccttgtgg

SEQ ID NO: 32117 - DNA, 20 bp, Artificial Sequence
  Synthetic
gatgaagggaactttttccc

SEQ ID NO: 32118 - DNA, 20 bp, Artificial Sequence
  Synthetic
gggaactttttccctggcag

SEQ ID NO: 32119 - DNA, 20 bp, Artificial Sequence
  Synthetic
ttgccaatgtggagcagtgg

SEQ ID NO: 32120 - DNA, 20 bp, Artificial Sequence
  Synthetic
ggcggtgtgtctctatcctc

SEQ ID NO: 32121 - DNA, 20 bp, Artificial Sequence
  Synthetic
tctatcctccggaatcattc

SEQ ID NO: 32122 - DNA, 20 bp, Artificial Sequence
  Synthetic
atcctccggaatcattcagg

SEQ ID NO: 32123 - DNA, 20 bp, Artificial Sequence
  Synthetic
caccgcctgaatgattccgg

SEQ ID NO: 32124 - DNA, 20 bp, Artificial Sequence
  Synthetic
actcaccgcctgaatgattc

SEQ ID NO: 32125 - DNA, 20 bp, Artificial Sequence
  Synthetic
ctgtcttctttcagatgtga

SEQ ID NO: 32126 - DNA, 20 bp, Artificial Sequence
  Synthetic
cagatgtgatggatgtagca

SEQ ID NO: 32127 - DNA, 20 bp, Artificial Sequence
  Synthetic
catggtctccccacgatgcc

SEQ ID NO: 32128 - DNA, 20 bp, Artificial Sequence
  Synthetic
gaggctagccaggcatcgtg

SEQ ID NO: 32129 - DNA, 20 bp, Artificial Sequence
  Synthetic
tgaggctagccaggcatcgt

SEQ ID NO: 32130 - DNA, 20 bp, Artificial Sequence
  Synthetic
atgaggctagccaggcatcg

SEQ ID NO: 32131 - DNA, 20 bp, Artificial Sequence
  Synthetic
cacgctgcatgaggctagcc

SEQ ID NO: 32132 - DNA, 20 bp, Artificial Sequence
  Synthetic
ctggctagcctcatgcagcg

SEQ ID NO: 32133 - DNA, 20 bp, Artificial Sequence
  Synthetic
agtgttatccacgctgcatg

SEQ ID NO: 32134 - DNA, 20 bp, Artificial Sequence
  Synthetic
tggataacactgtcgtcatc

SEQ ID NO: 32135 - DNA, 20 bp, Artificial Sequence
  Synthetic
tgccagatggacaatcactt

SEQ ID NO: 32136 - DNA, 20 bp, Artificial Sequence
  Synthetic
tacctaagtgattgtccatc

SEQ ID NO: 32137 - DNA, 20 bp, Artificial Sequence
  Synthetic
cgcacacagttcacacatgc

SEQ ID NO: 32138 - DNA, 20 bp, Artificial Sequence
  Synthetic
cagcatgtgtgaactgtgtg

SEQ ID NO: 32139 - DNA, 20 bp, Artificial Sequence
  Synthetic
catgtgtgaactgtgtgcgg

SEQ ID NO: 32140 - DNA, 20 bp, Artificial Sequence
  Synthetic
tgtgtgcggtggtcaaacag

SEQ ID NO: 32141 - DNA, 20 bp, Artificial Sequence
  Synthetic
gtgtgcggtggtcaaacagt

SEQ ID NO: 32142 - DNA, 20 bp, Artificial Sequence
  Synthetic
agtgggatgtatttagcttc

SEQ ID NO: 32143 - DNA, 20 bp, Artificial Sequence
  Synthetic
gtgggatgtatttagcttct

SEQ ID NO: 32144 - DNA, 20 bp, Artificial Sequence
  Synthetic
tgggatgtatttagcttctg

SEQ ID NO: 32145 - DNA, 20 bp, Artificial Sequence
  Synthetic
gggatgtatttagcttctgg

SEQ ID NO: 32146 - DNA, 20 bp, Artificial Sequence
  Synthetic
gggagatgacaaactgatta

SEQ ID NO: 32147 - DNA, 20 bp, Artificial Sequence
  Synthetic
atgacaaactgattatggtg

SEQ ID NO: 32148 - DNA, 20 bp, Artificial Sequence
  Synthetic
aactgattatggtgtggaag

SEQ ID NO: 32149 - DNA, 20 bp, Artificial Sequence
  Synthetic
actgattatggtgtggaagc

SEQ ID NO: 32150 - DNA, 20 bp, Artificial Sequence
  Synthetic
gaaattctagctactctgag

SEQ ID NO: 32151 - DNA, 20 bp, Artificial Sequence
  Synthetic
gctactctgagaggtcattc

SEQ ID NO: 32152 - DNA, 20 bp, Artificial Sequence
  Synthetic
tctgagaggtcattctggct

SEQ ID NO: 32153 - DNA, 20 bp, Artificial Sequence
  Synthetic
ggtcattctggcttggtcaa

SEQ ID NO: 32154 - DNA, 20 bp, Artificial Sequence
  Synthetic
gtcattctggcttggtcaaa

SEQ ID NO: 32155 - DNA, 20 bp, Artificial Sequence
  Synthetic
gcttggtcaaagggttgaca

SEQ ID NO: 32156 - DNA, 20 bp, Artificial Sequence
  Synthetic
cttggtcaaagggttgacat

SEQ ID NO: 32157 - DNA, 20 bp, Artificial Sequence
  Synthetic
gggttgacatgggaccctgt

SEQ ID NO: 32158 - DNA, 20 bp, Artificial Sequence
  Synthetic
aagctatgtatttaccaaca

SEQ ID NO: 32159 - DNA, 20 bp, Artificial Sequence
  Synthetic
gaagctatgtatttaccaac

SEQ ID NO: 32160 - DNA, 20 bp, Artificial Sequence
  Synthetic
agctgatgaccgcagcctaa

SEQ ID NO: 32161 - DNA, 20 bp, Artificial Sequence
  Synthetic
atgaccgcagcctaaaggtg

SEQ ID NO: 32162 - DNA, 20 bp, Artificial Sequence
  Synthetic
accgcagcctaaaggtgtgg

SEQ ID NO: 32163 - DNA, 20 bp, Artificial Sequence
  Synthetic
tcctccacacctttaggctg

SEQ ID NO: 32164 - DNA, 20 bp, Artificial Sequence
  Synthetic
ccagcgtcctccacaccttt

SEQ ID NO: 32165 - DNA, 20 bp, Artificial Sequence
  Synthetic
actgaaaaaatcggcttgcc

SEQ ID NO: 32166 - DNA, 20 bp, Artificial Sequence
  Synthetic
tgaatatcaactgaaaaaat

SEQ ID NO: 32167 - DNA, 20 bp, Artificial Sequence
  Synthetic
tcagttgatattcaccctga

SEQ ID NO: 32168 - DNA, 20 bp, Artificial Sequence
  Synthetic
cagttgatattcaccctgac

SEQ ID NO: 32169 - DNA, 20 bp, Artificial Sequence
  Synthetic
ttgcgaacttggtcccgtca

SEQ ID NO: 32170 - DNA, 20 bp, Artificial Sequence
  Synthetic
gttgcgaacttggtcccgtc

SEQ ID NO: 32171 - DNA, 20 bp, Artificial Sequence
  Synthetic
gacgggaccaagttcgcaac

SEQ ID NO: 32172 - DNA, 20 bp, Artificial Sequence
  Synthetic
gggaccaagttcgcaactgg

SEQ ID NO: 32173 - DNA, 20 bp, Artificial Sequence
  Synthetic
ttgtcctccagttgcgaact

SEQ ID NO: 32174 - DNA, 20 bp, Artificial Sequence
  Synthetic
aagttcgcaactggaggaca

SEQ ID NO: 32175 - DNA, 20 bp, Artificial Sequence
  Synthetic
tttgttccagggcaggattc

SEQ ID NO: 32176 - DNA, 20 bp, Artificial Sequence
  Synthetic
ttgttccagggcaggattct

SEQ ID NO: 32177 - DNA, 20 bp, Artificial Sequence
  Synthetic
tccagggcaggattctggga

SEQ ID NO: 32178 - DNA, 20 bp, Artificial Sequence
  Synthetic
accttcccagaatcctgccc

SEQ ID NO: 32179 - DNA, 20 bp, Artificial Sequence
  Synthetic
attctgggaaggttgtgatc

SEQ ID NO: 32180 - DNA, 20 bp, Artificial Sequence
  Synthetic
aagaccaacatggactttgt

SEQ ID NO: 32181 - DNA, 20 bp, Artificial Sequence
  Synthetic
agaccaacatggactttgtt

SEQ ID NO: 32182 - DNA, 20 bp, Artificial Sequence
  Synthetic
acatggactttgttgggcac

SEQ ID NO: 32183 - DNA, 20 bp, Artificial Sequence
  Synthetic
ccacgacagtcacagctttc

SEQ ID NO: 32184 - DNA, 20 bp, Artificial Sequence
  Synthetic
ccggaaagctgtgactgtcg

SEQ ID NO: 32185 - DNA, 20 bp, Artificial Sequence
  Synthetic
gcttctttttgaagattttt

SEQ ID NO: 32186 - DNA, 20 bp, Artificial Sequence
  Synthetic
tgcttctttttgaagatttt

SEQ ID NO: 32187 - DNA, 20 bp, Artificial Sequence
  Synthetic
ttcaaaaagaagcagaagaa

SEQ ID NO: 32188 - DNA, 20 bp, Artificial Sequence
  Synthetic
tcaaaaagaagcagaagaat

SEQ ID NO: 32189 - DNA, 20 bp, Artificial Sequence
  Synthetic
cagcagcagtacgggcagct

SEQ ID NO: 32190 - DNA, 20 bp, Artificial Sequence
  Synthetic
caacagcacagcagcagtac

SEQ ID NO: 32191 - DNA, 20 bp, Artificial Sequence
  Synthetic
ccaacagcacagcagcagta

SEQ ID NO: 32192 - DNA, 20 bp, Artificial Sequence
  Synthetic
ccgtactgctgctgtgctgt

SEQ ID NO: 32193 - DNA, 20 bp, Artificial Sequence
  Synthetic
ctgctgtgctgttggcagca

SEQ ID NO: 32194 - DNA, 20 bp, Artificial Sequence
  Synthetic
aggaccgctcgctttctgtc

SEQ ID NO: 32195 - DNA, 20 bp, Artificial Sequence
  Synthetic
ggaccgctcgctttctgtct

SEQ ID NO: 32196 - DNA, 20 bp, Artificial Sequence
  Synthetic
tcacccagacagaaagcgag

SEQ ID NO: 32197 - DNA, 20 bp, Artificial Sequence
  Synthetic
gcagccaggtcagcactgtg

SEQ ID NO: 32198 - DNA, 20 bp, Artificial Sequence
  Synthetic
gcactgtgtggcacgtgttc

SEQ ID NO: 32199 - DNA, 20 bp, Artificial Sequence
  Synthetic
cactgtgtggcacgtgttcc

SEQ ID NO: 32200 - DNA, 20 bp, Artificial Sequence
  Synthetic
gtggcacgtgttccgggcac

SEQ ID NO: 32201 - DNA, 20 bp, Artificial Sequence
  Synthetic
tgcgctgggcgtcctgtgcc

SEQ ID NO: 32202 - DNA, 20 bp, Artificial Sequence
  Synthetic
gagaaagcggcggatgcgct

SEQ ID NO: 32203 - DNA, 20 bp, Artificial Sequence
  Synthetic
ggagaaagcggcggatgcgc

SEQ ID NO: 32204 - DNA, 20 bp, Artificial Sequence
  Synthetic
catccgccgctttctccaga

SEQ ID NO: 32205 - DNA, 20 bp, Artificial Sequence
  Synthetic
tcaccatctggagaaagcgg

SEQ ID NO: 32206 - DNA, 20 bp, Artificial Sequence
  Synthetic
tcctcaccatctggagaaag

SEQ ID NO: 32207 - DNA, 20 bp, Artificial Sequence
  Synthetic
ccggctgcctcctcaccatc

SEQ ID NO: 32208 - DNA, 20 bp, Artificial Sequence
  Synthetic
tctcttctttgaggtgtgcc

SEQ ID NO: 32209 - DNA, 20 bp, Artificial Sequence
  Synthetic
ttctttgaggtgtgcccggc

SEQ ID NO: 32210 - DNA, 20 bp, Artificial Sequence
  Synthetic
tctttgaggtgtgcccggcc

SEQ ID NO: 32211 - DNA, 20 bp, Artificial Sequence
  Synthetic
ctttgaggtgtgcccggccg

SEQ ID NO: 32212 - DNA, 20 bp, Artificial Sequence
  Synthetic
gaggtgtgcccggccggggc

SEQ ID NO: 32213 - DNA, 20 bp, Artificial Sequence
  Synthetic
ccagggcgcctgccccggcc

SEQ ID NO: 32214 - DNA, 20 bp, Artificial Sequence
  Synthetic
cccggccggggcaggcgccc

SEQ ID NO: 32215 - DNA, 20 bp, Artificial Sequence
  Synthetic
tccagggcgcctgccccggc

SEQ ID NO: 32216 - DNA, 20 bp, Artificial Sequence
  Synthetic
aggctccagggcgcctgccc

SEQ ID NO: 32217 - DNA, 20 bp, Artificial Sequence
  Synthetic
ggggcaggcgccctggagcc

SEQ ID NO: 32218 - DNA, 20 bp, Artificial Sequence
  Synthetic
gccctggagcctggcgcccc

SEQ ID NO: 32219 - DNA, 20 bp, Artificial Sequence
  Synthetic
gcctggggcgccaggctcca

SEQ ID NO: 32220 - DNA, 20 bp, Artificial Sequence
  Synthetic
tgcctggggcgccaggctcc

SEQ ID NO: 32221 - DNA, 20 bp, Artificial Sequence
  Synthetic
tagcagctgcctggggcgcc

SEQ ID NO: 32222 - DNA, 20 bp, Artificial Sequence
  Synthetic
cgccccaggcagctgctacc

SEQ ID NO: 32223 - DNA, 20 bp, Artificial Sequence
  Synthetic
atccaggtagcagctgcctg

SEQ ID NO: 32224 - DNA, 20 bp, Artificial Sequence
  Synthetic
catccaggtagcagctgcct

SEQ ID NO: 32225 - DNA, 20 bp, Artificial Sequence
  Synthetic
gcatccaggtagcagctgcc

SEQ ID NO: 32226 - DNA, 20 bp, Artificial Sequence
  Synthetic
ggcagctgctacctggatgc

SEQ ID NO: 32227 - DNA, 20 bp, Artificial Sequence
  Synthetic
gcagctgctacctggatgca

SEQ ID NO: 32228 - DNA, 20 bp, Artificial Sequence
  Synthetic
gctacctggatgcagggctg

SEQ ID NO: 32229 - DNA, 20 bp, Artificial Sequence
  Synthetic
acctggatgcagggctgcgg

SEQ ID NO: 32230 - DNA, 20 bp, Artificial Sequence
  Synthetic
gccgccgcagccctgcatcc

SEQ ID NO: 32231 - DNA, 20 bp, Artificial Sequence
  Synthetic
cagggctgcggcggcgcctg

SEQ ID NO: 32232 - DNA, 20 bp, Artificial Sequence
  Synthetic
agggctgcggcggcgcctgc

SEQ ID NO: 32233 - DNA, 20 bp, Artificial Sequence
  Synthetic
gctgcggcggcgcctgcggg

SEQ ID NO: 32234 - DNA, 20 bp, Artificial Sequence
  Synthetic
ggcggcgcctgcgggaggag

SEQ ID NO: 32235 - DNA, 20 bp, Artificial Sequence
  Synthetic
gcggcgcctgcgggaggagt

SEQ ID NO: 32236 - DNA, 20 bp, Artificial Sequence
  Synthetic
cggcgcctgcgggaggagtg

SEQ ID NO: 32237 - DNA, 20 bp, Artificial Sequence
  Synthetic
tcacgccccactcctcccgc

SEQ ID NO: 32238 - DNA, 20 bp, Artificial Sequence
  Synthetic
aggagtggggcgtgagctgc

SEQ ID NO: 32239 - DNA, 20 bp, Artificial Sequence
  Synthetic
gagctgctggaccctgctcc

SEQ ID NO: 32240 - DNA, 20 bp, Artificial Sequence
  Synthetic
tggaccctgctccaggcccc

SEQ ID NO: 32241 - DNA, 20 bp, Artificial Sequence
  Synthetic
ctctccgggggcctggagca

SEQ ID NO: 32242 - DNA, 20 bp, Artificial Sequence
  Synthetic
cctctccgggggcctggagc

SEQ ID NO: 32243 - DNA, 20 bp, Artificial Sequence
  Synthetic
cctgctccaggcccccggag

SEQ ID NO: 32244 - DNA, 20 bp, Artificial Sequence
  Synthetic
gcacggcctctccgggggcc

SEQ ID NO: 32245 - DNA, 20 bp, Artificial Sequence
  Synthetic
ggcccccggagaggccgtgc

SEQ ID NO: 32246 - DNA, 20 bp, Artificial Sequence
  Synthetic
caccagcacggcctctccgg

SEQ ID NO: 32247 - DNA, 20 bp, Artificial Sequence
  Synthetic
gcaccagcacggcctctccg

SEQ ID NO: 32248 - DNA, 20 bp, Artificial Sequence
  Synthetic
ggcaccagcacggcctctcc

SEQ ID NO: 32249 - DNA, 20 bp, Artificial Sequence
  Synthetic
aggcaccagcacggcctctc

SEQ ID NO: 32250 - DNA, 20 bp, Artificial Sequence
  Synthetic
gaggccgtgctggtgcctgc

SEQ ID NO: 32251 - DNA, 20 bp, Artificial Sequence
  Synthetic
aggccgtgctggtgcctgca

SEQ ID NO: 32252 - DNA, 20 bp, Artificial Sequence
  Synthetic
ggccgtgctggtgcctgcag

SEQ ID NO: 32253 - DNA, 20 bp, Artificial Sequence
  Synthetic
agcccctgcaggcaccagca

SEQ ID NO: 32254 - DNA, 20 bp, Artificial Sequence
  Synthetic
gcctgcaggggctccccacc

SEQ ID NO: 32255 - DNA, 20 bp, Artificial Sequence
  Synthetic
acctggtggggagcccctgc

SEQ ID NO: 32256 - DNA, 20 bp, Artificial Sequence
  Synthetic
ccgctgggaagcacctggtg

SEQ ID NO: 32257 - DNA, 20 bp, Artificial Sequence
  Synthetic
cccgctgggaagcacctggt

SEQ ID NO: 32258 - DNA, 20 bp, Artificial Sequence
  Synthetic
gcccgctgggaagcacctgg

SEQ ID NO: 32259 - DNA, 20 bp, Artificial Sequence
  Synthetic
tgtccccccgacacaggtgc

SEQ ID NO: 32260 - DNA, 20 bp, Artificial Sequence
  Synthetic
gtccccccgacacaggtgca

SEQ ID NO: 32261 - DNA, 20 bp, Artificial Sequence
  Synthetic
cccgacacaggtgcagggcc

SEQ ID NO: 32262 - DNA, 20 bp, Artificial Sequence
  Synthetic
tgacgctgactgtgctcacc

SEQ ID NO: 32263 - DNA, 20 bp, Artificial Sequence
  Synthetic
ggtaacagaggagaataaga

SEQ ID NO: 32264 - DNA, 20 bp, Artificial Sequence
  Synthetic
catttccatcttcactgagc

SEQ ID NO: 32265 - DNA, 20 bp, Artificial Sequence
  Synthetic
gagggcagcaaagccttgca

SEQ ID NO: 32266 - DNA, 20 bp, Artificial Sequence
  Synthetic
agttgttgctggttgacttg

SEQ ID NO: 32267 - DNA, 20 bp, Artificial Sequence
  Synthetic
ctacctgttgcagttgttgc

SEQ ID NO: 32268 - DNA, 20 bp, Artificial Sequence
  Synthetic
caaccagcaacaactgcaac

SEQ ID NO: 32269 - DNA, 20 bp, Artificial Sequence
  Synthetic
cagcaacaactgcaacaggt

SEQ ID NO: 32270 - DNA, 20 bp, Artificial Sequence
  Synthetic
tgcattctttatgtagctca

SEQ ID NO: 32271 - DNA, 20 bp, Artificial Sequence
  Synthetic
tttatgtagctcatggacat

SEQ ID NO: 32272 - DNA, 20 bp, Artificial Sequence
  Synthetic
ctttatgtagctcatggaca

SEQ ID NO: 32273 - DNA, 20 bp, Artificial Sequence
  Synthetic
tcatggacatgggcttcaca

SEQ ID NO: 32274 - DNA, 20 bp, Artificial Sequence
  Synthetic
catggacatgggcttcacaa

SEQ ID NO: 32275 - DNA, 20 bp, Artificial Sequence
  Synthetic
cttcacaagggaacatgcaa

SEQ ID NO: 32276 - DNA, 20 bp, Artificial Sequence
  Synthetic
cacaagggaacatgcaatgg

SEQ ID NO: 32277 - DNA, 20 bp, Artificial Sequence
  Synthetic
actgttgaacaccagcacca

SEQ ID NO: 32278 - DNA, 20 bp, Artificial Sequence
  Synthetic
tgtggcctgctccatggtgc

SEQ ID NO: 32279 - DNA, 20 bp, Artificial Sequence
  Synthetic
gaacaccagcaccatggagc

SEQ ID NO: 32280 - DNA, 20 bp, Artificial Sequence
  Synthetic
gtactctgtggcctgctcca

SEQ ID NO: 32281 - DNA, 20 bp, Artificial Sequence
  Synthetic
gtgggttaaaaggtactctg

SEQ ID NO: 32282 - DNA, 20 bp, Artificial Sequence
  Synthetic
tacggaacaaggcatacata

SEQ ID NO: 32283 - DNA, 20 bp, Artificial Sequence
  Synthetic
gtacggaacaaggcatacat

SEQ ID NO: 32284 - DNA, 20 bp, Artificial Sequence
  Synthetic
accaggtgaggtacggaaca

SEQ ID NO: 32285 - DNA, 20 bp, Artificial Sequence
  Synthetic
ctcgatcaccaggtgaggta

SEQ ID NO: 32286 - DNA, 20 bp, Artificial Sequence
  Synthetic
gccttgttccgtacctcacc

SEQ ID NO: 32287 - DNA, 20 bp, Artificial Sequence
  Synthetic
ggtgactcgatcaccaggtg

SEQ ID NO: 32288 - DNA, 20 bp, Artificial Sequence
  Synthetic
gtgtaggtgactcgatcacc

SEQ ID NO: 32289 - DNA, 20 bp, Artificial Sequence
  Synthetic
ggaagatggattgatggtgt

SEQ ID NO: 32290 - DNA, 20 bp, Artificial Sequence
  Synthetic
gcagtgggaagatggattga

SEQ ID NO: 32291 - DNA, 20 bp, Artificial Sequence
  Synthetic
ttggggttgcagtgggaaga

SEQ ID NO: 32292 - DNA, 20 bp, Artificial Sequence
  Synthetic
gaggtggttggggttgcagt

SEQ ID NO: 32293 - DNA, 20 bp, Artificial Sequence
  Synthetic
tgaggtggttggggttgcag

SEQ ID NO: 32294 - DNA, 20 bp, Artificial Sequence
  Synthetic
tgaagtagctgaggtggttg

SEQ ID NO: 32295 - DNA, 20 bp, Artificial Sequence
  Synthetic
cttgaagtagctgaggtggt

SEQ ID NO: 32296 - DNA, 20 bp, Artificial Sequence
  Synthetic
ttgaagtagctgaggtggtt

SEQ ID NO: 32297 - DNA, 20 bp, Artificial Sequence
  Synthetic
caaacttgaagtagctgagg

SEQ ID NO: 32298 - DNA, 20 bp, Artificial Sequence
  Synthetic
cgacaaacttgaagtagctg

SEQ ID NO: 32299 - DNA, 20 bp, Artificial Sequence
  Synthetic
ctcagctacttcaagtttgt

SEQ ID NO: 32300 - DNA, 20 bp, Artificial Sequence
  Synthetic
caagtttgtcggacgcattg

SEQ ID NO: 32301 - DNA, 20 bp, Artificial Sequence
  Synthetic
acggttgtcatatacagctt

SEQ ID NO: 32302 - DNA, 20 bp, Artificial Sequence
  Synthetic
tgtatatgacaaccgtcttc

SEQ ID NO: 32303 - DNA, 20 bp, Artificial Sequence
  Synthetic
taaagtagcactccagaaga

SEQ ID NO: 32304 - DNA, 20 bp, Artificial Sequence
  Synthetic
gcccaagatgtgtttgtaaa

SEQ ID NO: 32305 - DNA, 20 bp, Artificial Sequence
  Synthetic
acatcttgggcaagtcagtc

SEQ ID NO: 32306 - DNA, 20 bp, Artificial Sequence
  Synthetic
aaaccagaccttggtagaag

SEQ ID NO: 32307 - DNA, 20 bp, Artificial Sequence
  Synthetic
gaagattaccacttctacca

SEQ ID NO: 32308 - DNA, 20 bp, Artificial Sequence
  Synthetic
ccagcagataaaccagacct

SEQ ID NO: 32309 - DNA, 20 bp, Artificial Sequence
  Synthetic
ttaccacttctaccaaggtc

SEQ ID NO: 32310 - DNA, 20 bp, Artificial Sequence
  Synthetic
ccaaggtctggtttatctgc

SEQ ID NO: 32311 - DNA, 20 bp, Artificial Sequence
  Synthetic
gaaaatgatgtctccacact

SEQ ID NO: 32312 - DNA, 20 bp, Artificial Sequence
  Synthetic
ggtgaggtcatagcctagtg

SEQ ID NO: 32313 - DNA, 20 bp, Artificial Sequence
  Synthetic
ctacctcagtgctgaaggtg

SEQ ID NO: 32314 - DNA, 20 bp, Artificial Sequence
  Synthetic
ctgacctacctcagtgctga

SEQ ID NO: 32315 - DNA, 20 bp, Artificial Sequence
  Synthetic
tgacctcaccttcagcactg

SEQ ID NO: 32316 - DNA, 20 bp, Artificial Sequence
  Synthetic
ctcaccttcagcactgaggt

SEQ ID NO: 32317 - DNA, 20 bp, Artificial Sequence
  Synthetic
cttcacaaactccaaactct

SEQ ID NO: 32318 - DNA, 20 bp, Artificial Sequence
  Synthetic
ttgttctaggtccaagagtt

SEQ ID NO: 32319 - DNA, 20 bp, Artificial Sequence
  Synthetic
tgttggccccattgggtttg

SEQ ID NO: 32320 - DNA, 20 bp, Artificial Sequence
  Synthetic
gttcgtgacctcaaacccaa

SEQ ID NO: 32321 - DNA, 20 bp, Artificial Sequence
  Synthetic
ttcgtgacctcaaacccaat

SEQ ID NO: 32322 - DNA, 20 bp, Artificial Sequence
  Synthetic
tcgtgacctcaaacccaatg

SEQ ID NO: 32323 - DNA, 20 bp, Artificial Sequence
  Synthetic
taccaagatgttggccccat

SEQ ID NO: 32324 - DNA, 20 bp, Artificial Sequence
  Synthetic
accaagatgttggccccatt

SEQ ID NO: 32325 - DNA, 20 bp, Artificial Sequence
  Synthetic
ctcctctgttaccaagatgt

SEQ ID NO: 32326 - DNA, 20 bp, Artificial Sequence
  Synthetic
acccaatggggccaacatct

SEQ ID NO: 32327 - DNA, 20 bp, Artificial Sequence
  Synthetic
ggccaacatcttggtaacag

SEQ ID NO: 32328 - DNA, 20 bp, Artificial Sequence
  Synthetic
taagaaggagtatgtacacc

SEQ ID NO: 32329 - DNA, 20 bp, Artificial Sequence
  Synthetic
tcattctcatctggcatacc

SEQ ID NO: 32330 - DNA, 20 bp, Artificial Sequence
  Synthetic
ccctacctgtcattctcatc

SEQ ID NO: 32331 - DNA, 20 bp, Artificial Sequence
  Synthetic
gtatgccagatgagaatgac

SEQ ID NO: 32332 - DNA, 20 bp, Artificial Sequence
  Synthetic
gccagatgagaatgacaggt

SEQ ID NO: 32333 - DNA, 20 bp, Artificial Sequence
  Synthetic
aactgcttgcggatggctcc

SEQ ID NO: 32334 - DNA, 20 bp, Artificial Sequence
  Synthetic
agccgccaactgcttgcgga

SEQ ID NO: 32335 - DNA, 20 bp, Artificial Sequence
  Synthetic
agaaagccgccaactgcttg

SEQ ID NO: 32336 - DNA, 20 bp, Artificial Sequence
  Synthetic
aggagccatccgcaagcagt

SEQ ID NO: 32337 - DNA, 20 bp, Artificial Sequence
  Synthetic
agccatccgcaagcagttgg

SEQ ID NO: 32338 - DNA, 20 bp, Artificial Sequence
  Synthetic
cagttggcggctttcttaga

SEQ ID NO: 32339 - DNA, 20 bp, Artificial Sequence
  Synthetic
aagatggaaatgaggcgctt

SEQ ID NO: 32340 - DNA, 20 bp, Artificial Sequence
  Synthetic
gctcagtgaagatggaaatg

SEQ ID NO: 32341 - DNA, 20 bp, Artificial Sequence
  Synthetic
taactcctgctcagtgaaga

SEQ ID NO: 32342 - DNA, 20 bp, Artificial Sequence
  Synthetic
gagttagagctgcttatatc

SEQ ID NO: 32343 - DNA, 20 bp, Artificial Sequence
  Synthetic
agatcatcgatgtcaatggt

SEQ ID NO: 32344 - DNA, 20 bp, Artificial Sequence
  Synthetic
cagatcatcgatgtcaatgg

SEQ ID NO: 32345 - DNA, 20 bp, Artificial Sequence
  Synthetic
tttcagatcatcgatgtcaa

SEQ ID NO: 32346 - DNA, 20 bp, Artificial Sequence
  Synthetic
gtacttgtggtattcagtgt

SEQ ID NO: 32347 - DNA, 20 bp, Artificial Sequence
  Synthetic
tagagttggactggtacttg

SEQ ID NO: 32348 - DNA, 20 bp, Artificial Sequence
  Synthetic
tcacctgaatagagttggac

SEQ ID NO: 32349 - DNA, 20 bp, Artificial Sequence
  Synthetic
gcagctcacctgaatagagt

SEQ ID NO: 32350 - DNA, 20 bp, Artificial Sequence
  Synthetic
gtaccagtccaactctattc

SEQ ID NO: 32351 - DNA, 20 bp, Artificial Sequence
  Synthetic
gtcccttcctacagatccag

SEQ ID NO: 32352 - DNA, 20 bp, Artificial Sequence
  Synthetic
gcaatgctctccagaaccac

SEQ ID NO: 32353 - DNA, 20 bp, Artificial Sequence
  Synthetic
tcctacagatccagtggttc

SEQ ID NO: 32354 - DNA, 20 bp, Artificial Sequence
  Synthetic
caaactggaggaacttggca

SEQ ID NO: 32355 - DNA, 20 bp, Artificial Sequence
  Synthetic
cgtgacaaactggaggaact

SEQ ID NO: 32356 - DNA, 20 bp, Artificial Sequence
  Synthetic
aagtacccgtgacaaactgg

SEQ ID NO: 32357 - DNA, 20 bp, Artificial Sequence
  Synthetic
tggaagtacccgtgacaaac

SEQ ID NO: 32358 - DNA, 20 bp, Artificial Sequence
  Synthetic
aagttcctccagtttgtcac

SEQ ID NO: 32359 - DNA, 20 bp, Artificial Sequence
  Synthetic
gtttgtcacgggtacttcca

SEQ ID NO: 32360 - DNA, 20 bp, Artificial Sequence
  Synthetic
aaagccttgcaggggtacct

SEQ ID NO: 32361 - DNA, 20 bp, Artificial Sequence
  Synthetic
acttccaaggtacccctgca

SEQ ID NO: 32362 - DNA, 20 bp, Artificial Sequence
  Synthetic
cgagggcagcaaagccttgc

SEQ ID NO: 32363 - DNA, 20 bp, Artificial Sequence
  Synthetic
agggcagcaaagccttgcag

SEQ ID NO: 32364 - DNA, 20 bp, Artificial Sequence
  Synthetic
caaggctttgctgccctcga

SEQ ID NO: 32365 - DNA, 20 bp, Artificial Sequence
  Synthetic
gaatgccattcatgccttcg

SEQ ID NO: 32366 - DNA, 20 bp, Artificial Sequence
  Synthetic
aatgccattcatgccttcga

SEQ ID NO: 32367 - DNA, 20 bp, Artificial Sequence
  Synthetic
gctgccctcgaaggcatgaa

SEQ ID NO: 32368 - DNA, 20 bp, Artificial Sequence
  Synthetic
ctgtggacctgtcatctcga

SEQ ID NO: 32369 - DNA, 20 bp, Artificial Sequence
  Synthetic
ttcagatccatcgagatgac

SEQ ID NO: 32370 - DNA, 20 bp, Artificial Sequence
  Synthetic
agctgaaggcaggcgatctg

SEQ ID NO: 32371 - DNA, 20 bp, Artificial Sequence
  Synthetic
accatgtgtgagctgaaggc

SEQ ID NO: 32372 - DNA, 20 bp, Artificial Sequence
  Synthetic
gcctgccttcagctcacaca

SEQ ID NO: 32373 - DNA, 20 bp, Artificial Sequence
  Synthetic
ttctcaaagctctcataggc

SEQ ID NO: 32374 - DNA, 20 bp, Artificial Sequence
  Synthetic
gagcttctcaaagctctcat

SEQ ID NO: 32375 - DNA, 20 bp, Artificial Sequence
  Synthetic
tagccaacagtagcatgtgg

SEQ ID NO: 32376 - DNA, 20 bp, Artificial Sequence
  Synthetic
ggatagccaacagtagcatg

SEQ ID NO: 32377 - DNA, 20 bp, Artificial Sequence
  Synthetic
gctccgccacatgctactgt

SEQ ID NO: 32378 - DNA, 20 bp, Artificial Sequence
  Synthetic
catgctactgttggctatcc

SEQ ID NO: 32379 - DNA, 20 bp, Artificial Sequence
  Synthetic
caaagccttcagagcactcc

SEQ ID NO: 32380 - DNA, 20 bp, Artificial Sequence
  Synthetic
gctatccaggagtgctctga

SEQ ID NO: 32381 - DNA, 20 bp, Artificial Sequence
  Synthetic
caggagtgctctgaaggctt

SEQ ID NO: 32382 - DNA, 20 bp, Artificial Sequence
  Synthetic
aggagtgctctgaaggcttt

SEQ ID NO: 32383 - DNA, 20 bp, Artificial Sequence
  Synthetic
gtgctctgaaggctttgggc

SEQ ID NO: 32384 - DNA, 20 bp, Artificial Sequence
  Synthetic
caagttcctccagtttgtca

SEQ ID NO: 32385 - DNA, 20 bp, Artificial Sequence
  Synthetic
gtggttggcgctggtgtggc

SEQ ID NO: 32386 - DNA, 20 bp, Artificial Sequence
  Synthetic
tggttggcgctggtgtggcc

SEQ ID NO: 32387 - DNA, 20 bp, Artificial Sequence
  Synthetic
tggcgctggtgtggccgggc

SEQ ID NO: 32388 - DNA, 20 bp, Artificial Sequence
  Synthetic
cgctggtgtggccgggctgg

SEQ ID NO: 32389 - DNA, 20 bp, Artificial Sequence
  Synthetic
ggccgggctggtggccgcca

SEQ ID NO: 32390 - DNA, 20 bp, Artificial Sequence
  Synthetic
caccttggcggccaccagcc

SEQ ID NO: 32391 - DNA, 20 bp, Artificial Sequence
  Synthetic
agcatcgctgagcaccttgg

SEQ ID NO: 32392 - DNA, 20 bp, Artificial Sequence
  Synthetic
gccaaggtgctcagcgatgc

SEQ ID NO: 32393 - DNA, 20 bp, Artificial Sequence
  Synthetic
tccagcatcgctgagcacct

SEQ ID NO: 32394 - DNA, 20 bp, Artificial Sequence
  Synthetic
gctcagcgatgctggacaca

SEQ ID NO: 32395 - DNA, 20 bp, Artificial Sequence
  Synthetic
cagcgatgctggacacaagg

SEQ ID NO: 32396 - DNA, 20 bp, Artificial Sequence
  Synthetic
agcgatgctggacacaaggt

SEQ ID NO: 32397 - DNA, 20 bp, Artificial Sequence
  Synthetic
actccctcaggtcaccatcc

SEQ ID NO: 32398 - DNA, 20 bp, Artificial Sequence
  Synthetic
ccctcaggtcaccatcctgg

SEQ ID NO: 32399 - DNA, 20 bp, Artificial Sequence
  Synthetic
cctgttatctgcctccagga

SEQ ID NO: 32400 - DNA, 20 bp, Artificial Sequence
  Synthetic
ccatcctggaggcagataac

SEQ ID NO: 32401 - DNA, 20 bp, Artificial Sequence
  Synthetic
cgatcctgttatctgcctcc

SEQ ID NO: 32402 - DNA, 20 bp, Artificial Sequence
  Synthetic
ctggaggcagataacaggat

SEQ ID NO: 32403 - DNA, 20 bp, Artificial Sequence
  Synthetic
tggaggcagataacaggatc

SEQ ID NO: 32404 - DNA, 20 bp, Artificial Sequence
  Synthetic
ggaggcagataacaggatcg

SEQ ID NO: 32405 - DNA, 20 bp, Artificial Sequence
  Synthetic
gaggcagataacaggatcgg

SEQ ID NO: 32406 - DNA, 20 bp, Artificial Sequence
  Synthetic
ggggccgcatcttcacctac

SEQ ID NO: 32407 - DNA, 20 bp, Artificial Sequence
  Synthetic
gggccgcatcttcacctacc

SEQ ID NO: 32408 - DNA, 20 bp, Artificial Sequence
  Synthetic
ggtcccggtaggtgaagatg

SEQ ID NO: 32409 - DNA, 20 bp, Artificial Sequence
  Synthetic
cacctaccgggaccagaaca

SEQ ID NO: 32410 - DNA, 20 bp, Artificial Sequence
  Synthetic
acctaccgggaccagaacac

SEQ ID NO: 32411 - DNA, 20 bp, Artificial Sequence
  Synthetic
gcccgtgttctggtcccggt

SEQ ID NO: 32412 - DNA, 20 bp, Artificial Sequence
  Synthetic
accgggaccagaacacgggc

SEQ ID NO: 32413 - DNA, 20 bp, Artificial Sequence
  Synthetic
tccagcccgtgttctggtcc

SEQ ID NO: 32414 - DNA, 20 bp, Artificial Sequence
  Synthetic
gaccagaacacgggctggat

SEQ ID NO: 32415 - DNA, 20 bp, Artificial Sequence
  Synthetic
accagaacacgggctggatt

SEQ ID NO: 32416 - DNA, 20 bp, Artificial Sequence
  Synthetic
ccccaatccagcccgtgttc

SEQ ID NO: 32417 - DNA, 20 bp, Artificial Sequence
  Synthetic
ccagaacacgggctggattg

SEQ ID NO: 32418 - DNA, 20 bp, Artificial Sequence
  Synthetic
cacgggctggattggggagc

SEQ ID NO: 32419 - DNA, 20 bp, Artificial Sequence
  Synthetic
acgggctggattggggagct

SEQ ID NO: 32420 - DNA, 20 bp, Artificial Sequence
  Synthetic
gtgagagctgggcatgcgca

SEQ ID NO: 32421 - DNA, 20 bp, Artificial Sequence
  Synthetic
tgcgcatgcccagctctcac

SEQ ID NO: 32422 - DNA, 20 bp, Artificial Sequence
  Synthetic
ctaggtcacctgtgagagct

SEQ ID NO: 32423 - DNA, 20 bp, Artificial Sequence
  Synthetic
gctaggtcacctgtgagagc

SEQ ID NO: 32424 - DNA, 20 bp, Artificial Sequence
  Synthetic
gatcctccacaagctctgcc

SEQ ID NO: 32425 - DNA, 20 bp, Artificial Sequence
  Synthetic
atcctccacaagctctgcca

SEQ ID NO: 32426 - DNA, 20 bp, Artificial Sequence
  Synthetic
ggccctggcagagcttgtgg

SEQ ID NO: 32427 - DNA, 20 bp, Artificial Sequence
  Synthetic
ccaggccctggcagagcttg

SEQ ID NO: 32428 - DNA, 20 bp, Artificial Sequence
  Synthetic
ccacaagctctgccagggcc

SEQ ID NO: 32429 - DNA, 20 bp, Artificial Sequence
  Synthetic
cacaagctctgccagggcct

SEQ ID NO: 32430 - DNA, 20 bp, Artificial Sequence
  Synthetic
acaagctctgccagggcctg

SEQ ID NO: 32431 - DNA, 20 bp, Artificial Sequence
  Synthetic
tcaggttgagccccaggccc

SEQ ID NO: 32432 - DNA, 20 bp, Artificial Sequence
  Synthetic
acttggtcaggttgagcccc

SEQ ID NO: 32433 - DNA, 20 bp, Artificial Sequence
  Synthetic
cgtactgggtgaacttggtc

SEQ ID NO: 32434 - DNA, 20 bp, Artificial Sequence
  Synthetic
cttgtcgtactgggtgaact

SEQ ID NO: 32435 - DNA, 20 bp, Artificial Sequence
  Synthetic
ccacgtgttcttgtcgtact

SEQ ID NO: 32436 - DNA, 20 bp, Artificial Sequence
  Synthetic
cccagtacgacaagaacacg

SEQ ID NO: 32437 - DNA, 20 bp, Artificial Sequence
  Synthetic
tccacgtgttcttgtcgtac

SEQ ID NO: 32438 - DNA, 20 bp, Artificial Sequence
  Synthetic
gtacgacaagaacacgtgga

SEQ ID NO: 32439 - DNA, 20 bp, Artificial Sequence
  Synthetic
cgacaagaacacgtggacgg

SEQ ID NO: 32440 - DNA, 20 bp, Artificial Sequence
  Synthetic
agtgaagctgcgcaactatg

SEQ ID NO: 32441 - DNA, 20 bp, Artificial Sequence
  Synthetic
gaagctgcgcaactatgtgg

SEQ ID NO: 32442 - DNA, 20 bp, Artificial Sequence
  Synthetic
gcgcaactatgtggtggaga

SEQ ID NO: 32443 - DNA, 20 bp, Artificial Sequence
  Synthetic
ggagaaggtgcccgagaagc

SEQ ID NO: 32444 - DNA, 20 bp, Artificial Sequence
  Synthetic
gagaaggtgcccgagaagct

SEQ ID NO: 32445 - DNA, 20 bp, Artificial Sequence
  Synthetic
aaggcgtagcccagcttctc

SEQ ID NO: 32446 - DNA, 20 bp, Artificial Sequence
  Synthetic
caaggcgtagcccagcttct

SEQ ID NO: 32447 - DNA, 20 bp, Artificial Sequence
  Synthetic
gggctacgccttgcgtcccc

SEQ ID NO: 32448 - DNA, 20 bp, Artificial Sequence
  Synthetic
cgccttgcgtccccaggaaa

SEQ ID NO: 32449 - DNA, 20 bp, Artificial Sequence
  Synthetic
gccttgcgtccccaggaaaa

SEQ ID NO: 32450 - DNA, 20 bp, Artificial Sequence
  Synthetic
gcccttttcctggggacgca

SEQ ID NO: 32451 - DNA, 20 bp, Artificial Sequence
  Synthetic
ggcgagtggcccttttcctg

SEQ ID NO: 32452 - DNA, 20 bp, Artificial Sequence
  Synthetic
gggcgagtggcccttttcct

SEQ ID NO: 32453 - DNA, 20 bp, Artificial Sequence
  Synthetic
cgggcgagtggcccttttcc

SEQ ID NO: 32454 - DNA, 20 bp, Artificial Sequence
  Synthetic
ggtagatgtcttcgggcgag

SEQ ID NO: 32455 - DNA, 20 bp, Artificial Sequence
  Synthetic
gcccgaagacatctaccaga

SEQ ID NO: 32456 - DNA, 20 bp, Artificial Sequence
  Synthetic
gccatctggtagatgtcttc

SEQ ID NO: 32457 - DNA, 20 bp, Artificial Sequence
  Synthetic
agccatctggtagatgtctt

SEQ ID NO: 32458 - DNA, 20 bp, Artificial Sequence
  Synthetic
ctaccagatggctctcaacc

SEQ ID NO: 32459 - DNA, 20 bp, Artificial Sequence
  Synthetic
ccacctggttgagagccatc

SEQ ID NO: 32460 - DNA, 20 bp, Artificial Sequence
  Synthetic
ccagatggctctcaaccagg

SEQ ID NO: 32461 - DNA, 20 bp, Artificial Sequence
  Synthetic
cagatggctctcaaccaggt

SEQ ID NO: 32462 - DNA, 20 bp, Artificial Sequence
  Synthetic
acaggccctcaaagacctca

SEQ ID NO: 32463 - DNA, 20 bp, Artificial Sequence
  Synthetic
cagtgccttgaggtctttga

SEQ ID NO: 32464 - DNA, 20 bp, Artificial Sequence
  Synthetic
ccagtgccttgaggtctttg

SEQ ID NO: 32465 - DNA, 20 bp, Artificial Sequence
  Synthetic
cctcaaagacctcaaggcac

SEQ ID NO: 32466 - DNA, 20 bp, Artificial Sequence
  Synthetic
ctcaaagacctcaaggcact

SEQ ID NO: 32467 - DNA, 20 bp, Artificial Sequence
  Synthetic
ttctgcagcccagtgccttg

SEQ ID NO: 32468 - DNA, 20 bp, Artificial Sequence
  Synthetic
caaggcactgggctgcagaa

SEQ ID NO: 32469 - DNA, 20 bp, Artificial Sequence
  Synthetic
aggcgatgaagaagtttgaa

SEQ ID NO: 32470 - DNA, 20 bp, Artificial Sequence
  Synthetic
gtttgaaaggcacacgctct

SEQ ID NO: 32471 - DNA, 20 bp, Artificial Sequence
  Synthetic
aacctgcaggaatatcttct

SEQ ID NO: 32472 - DNA, 20 bp, Artificial Sequence
  Synthetic
acctgcaggaatatcttctc

SEQ ID NO: 32473 - DNA, 20 bp, Artificial Sequence
  Synthetic
cctgcaggaatatcttctcg

SEQ ID NO: 32474 - DNA, 20 bp, Artificial Sequence
  Synthetic
gcaggaatatcttctcgggg

SEQ ID NO: 32475 - DNA, 20 bp, Artificial Sequence
  Synthetic
caggaatatcttctcgggga

SEQ ID NO: 32476 - DNA, 20 bp, Artificial Sequence
  Synthetic
aggaatatcttctcggggag

SEQ ID NO: 32477 - DNA, 20 bp, Artificial Sequence
  Synthetic
tcggggaggggaacctgagc

SEQ ID NO: 32478 - DNA, 20 bp, Artificial Sequence
  Synthetic
ggaggggaacctgagccggc

SEQ ID NO: 32479 - DNA, 20 bp, Artificial Sequence
  Synthetic
gctgcacggccggccggctc

SEQ ID NO: 32480 - DNA, 20 bp, Artificial Sequence
  Synthetic
ccagaagctgcacggccggc

SEQ ID NO: 32481 - DNA, 20 bp, Artificial Sequence
  Synthetic
ccggccggccgtgcagcttc

SEQ ID NO: 32482 - DNA, 20 bp, Artificial Sequence
  Synthetic
cggccggccgtgcagcttct

SEQ ID NO: 32483 - DNA, 20 bp, Artificial Sequence
  Synthetic
tctcccagaagctgcacggc

SEQ ID NO: 32484 - DNA, 20 bp, Artificial Sequence
  Synthetic
cacgtctcccagaagctgca

SEQ ID NO: 32485 - DNA, 20 bp, Artificial Sequence
  Synthetic
tctgggagacgtgatgtccg

SEQ ID NO: 32486 - DNA, 20 bp, Artificial Sequence
  Synthetic
ggagacgtgatgtccgagga

SEQ ID NO: 32487 - DNA, 20 bp, Artificial Sequence
  Synthetic
gagatagaagaagccatcct

SEQ ID NO: 32488 - DNA, 20 bp, Artificial Sequence
  Synthetic
cttctatctcagcttcgccg

SEQ ID NO: 32489 - DNA, 20 bp, Artificial Sequence
  Synthetic
tcagcttcgccgaggccctc

SEQ ID NO: 32490 - DNA, 20 bp, Artificial Sequence
  Synthetic
cagcttcgccgaggccctcc

SEQ ID NO: 32491 - DNA, 20 bp, Artificial Sequence
  Synthetic
gctgtgggcccggagggcct

SEQ ID NO: 32492 - DNA, 20 bp, Artificial Sequence
  Synthetic
gaggcagctgtgggcccgga

SEQ ID NO: 32493 - DNA, 20 bp, Artificial Sequence
  Synthetic
tgaggcagctgtgggcccgg

SEQ ID NO: 32494 - DNA, 20 bp, Artificial Sequence
  Synthetic
cgctgaggcagctgtgggcc

SEQ ID NO: 32495 - DNA, 20 bp, Artificial Sequence
  Synthetic
tctgtcgctgaggcagctgt

SEQ ID NO: 32496 - DNA, 20 bp, Artificial Sequence
  Synthetic
gtctgtcgctgaggcagctg

SEQ ID NO: 32497 - DNA, 20 bp, Artificial Sequence
  Synthetic
cttactggagtctgtcgctg

SEQ ID NO: 32498 - DNA, 20 bp, Artificial Sequence
  Synthetic
ctgcaggtacagccgcatcg

SEQ ID NO: 32499 - DNA, 20 bp, Artificial Sequence
  Synthetic
tgcaggtacagccgcatcgt

SEQ ID NO: 32500 - DNA, 20 bp, Artificial Sequence
  Synthetic
aggtacagccgcatcgtggg

SEQ ID NO: 32501 - DNA, 20 bp, Artificial Sequence
  Synthetic
acagccgcatcgtgggtggc

SEQ ID NO: 32502 - DNA, 20 bp, Artificial Sequence
  Synthetic
cagccgcatcgtgggtggct

SEQ ID NO: 32503 - DNA, 20 bp, Artificial Sequence
  Synthetic
ggtcccagccacccacgatg

SEQ ID NO: 32504 - DNA, 20 bp, Artificial Sequence
  Synthetic
tcagcagcgcgcgcggcagc

SEQ ID NO: 32505 - DNA, 20 bp, Artificial Sequence
  Synthetic
agcgagctcagcagcgcgcg

SEQ ID NO: 32506 - DNA, 20 bp, Artificial Sequence
  Synthetic
gcgctgctgagctcgctgtc

SEQ ID NO: 32507 - DNA, 20 bp, Artificial Sequence
  Synthetic
cgctgctgagctcgctgtcc

SEQ ID NO: 32508 - DNA, 20 bp, Artificial Sequence
  Synthetic
cgcgttcaacagcacaagcc

SEQ ID NO: 32509 - DNA, 20 bp, Artificial Sequence
  Synthetic
tgtgctgttgaacgcgcccg

SEQ ID NO: 32510 - DNA, 20 bp, Artificial Sequence
  Synthetic
gctgttgaacgcgcccgtgg

SEQ ID NO: 32511 - DNA, 20 bp, Artificial Sequence
  Synthetic
gcccgtggtggcgatgaccc

SEQ ID NO: 32512 - DNA, 20 bp, Artificial Sequence
  Synthetic
ccctgggtcatcgccaccac

SEQ ID NO: 32513 - DNA, 20 bp, Artificial Sequence
  Synthetic
cccgtggtggcgatgaccca

SEQ ID NO: 32514 - DNA, 20 bp, Artificial Sequence
  Synthetic
tccctgggtcatcgccacca

SEQ ID NO: 32515 - DNA, 20 bp, Artificial Sequence
  Synthetic
gtgcacatcgtgcggtccct

SEQ ID NO: 32516 - DNA, 20 bp, Artificial Sequence
  Synthetic
cgtgcacatcgtgcggtccc

SEQ ID NO: 32517 - DNA, 20 bp, Artificial Sequence
  Synthetic
atctgcacgtgcacatcgtg

SEQ ID NO: 32518 - DNA, 20 bp, Artificial Sequence
  Synthetic
gcagatcgagacctctcccc

SEQ ID NO: 32519 - DNA, 20 bp, Artificial Sequence
  Synthetic
tcgagacctctcccccggcg

SEQ ID NO: 32520 - DNA, 20 bp, Artificial Sequence
  Synthetic
cagattccgcgccgggggag

SEQ ID NO: 32521 - DNA, 20 bp, Artificial Sequence
  Synthetic
tcccccggcgcggaatctga

SEQ ID NO: 32522 - DNA, 20 bp, Artificial Sequence
  Synthetic
accttcagattccgcgccgg

SEQ ID NO: 32523 - DNA, 20 bp, Artificial Sequence
  Synthetic
caccttcagattccgcgccg

SEQ ID NO: 32524 - DNA, 20 bp, Artificial Sequence
  Synthetic
gcaccttcagattccgcgcc

SEQ ID NO: 32525 - DNA, 20 bp, Artificial Sequence
  Synthetic
agcaccttcagattccgcgc

SEQ ID NO: 32526 - DNA, 20 bp, Artificial Sequence
  Synthetic
gcggaatctgaaggtgctga

SEQ ID NO: 32527 - DNA, 20 bp, Artificial Sequence
  Synthetic
gaaggtgctgaaggccgacg

SEQ ID NO: 32528 - DNA, 20 bp, Artificial Sequence
  Synthetic
ggccgacgtggtgctgctga

SEQ ID NO: 32529 - DNA, 20 bp, Artificial Sequence
  Synthetic
cgccgtcagcagcaccacgt

SEQ ID NO: 32530 - DNA, 20 bp, Artificial Sequence
  Synthetic
gtggtgctgctgacggcgag

SEQ ID NO: 32531 - DNA, 20 bp, Artificial Sequence
  Synthetic
gctgctgacggcgagcggac

SEQ ID NO: 32532 - DNA, 20 bp, Artificial Sequence
  Synthetic
gctgacggcgagcggaccgg

SEQ ID NO: 32533 - DNA, 20 bp, Artificial Sequence
  Synthetic
aaggtgatgcgcttcaccgc

SEQ ID NO: 32534 - DNA, 20 bp, Artificial Sequence
  Synthetic
gcggggcagcggcggcgaga

SEQ ID NO: 32535 - DNA, 20 bp, Artificial Sequence
  Synthetic
tgcatgtggcggggcagcgg

SEQ ID NO: 32536 - DNA, 20 bp, Artificial Sequence
  Synthetic
gccgctgccccgccacatgc

SEQ ID NO: 32537 - DNA, 20 bp, Artificial Sequence
  Synthetic
tcctgcatgtggcggggcag

SEQ ID NO: 32538 - DNA, 20 bp, Artificial Sequence
  Synthetic
gctgccccgccacatgcagg

SEQ ID NO: 32539 - DNA, 20 bp, Artificial Sequence
  Synthetic
agcgcctcctgcatgtggcg

SEQ ID NO: 32540 - DNA, 20 bp, Artificial Sequence
  Synthetic
cagcgcctcctgcatgtggc

SEQ ID NO: 32541 - DNA, 20 bp, Artificial Sequence
  Synthetic
gcagcgcctcctgcatgtgg

SEQ ID NO: 32542 - DNA, 20 bp, Artificial Sequence
  Synthetic
gccacatgcaggaggcgctg

SEQ ID NO: 32543 - DNA, 20 bp, Artificial Sequence
  Synthetic
tccgcagcgcctcctgcatg

SEQ ID NO: 32544 - DNA, 20 bp, Artificial Sequence
  Synthetic
acatgcaggaggcgctgcgg

SEQ ID NO: 32545 - DNA, 20 bp, Artificial Sequence
  Synthetic
gcggaggctgcactacgtgc

SEQ ID NO: 32546 - DNA, 20 bp, Artificial Sequence
  Synthetic
gcactacgtgccggccacca

SEQ ID NO: 32547 - DNA, 20 bp, Artificial Sequence
  Synthetic
cttaggaacaccttggtggc

SEQ ID NO: 32548 - DNA, 20 bp, Artificial Sequence
  Synthetic
gaagcttaggaacaccttgg

SEQ ID NO: 32549 - DNA, 20 bp, Artificial Sequence
  Synthetic
gcggaagcttaggaacacct

SEQ ID NO: 32550 - DNA, 20 bp, Artificial Sequence
  Synthetic
aggtgttcctaagcttccgc

SEQ ID NO: 32551 - DNA, 20 bp, Artificial Sequence
  Synthetic
agaagggcctgcggaagctt

SEQ ID NO: 32552 - DNA, 20 bp, Artificial Sequence
  Synthetic
taagcttccgcaggcccttc

SEQ ID NO: 32553 - DNA, 20 bp, Artificial Sequence
  Synthetic
cctcgcgccagaagggcctg

SEQ ID NO: 32554 - DNA, 20 bp, Artificial Sequence
  Synthetic
ccgcaggcccttctggcgcg

SEQ ID NO: 32555 - DNA, 20 bp, Artificial Sequence
  Synthetic
atgtgctcctcgcgccagaa

SEQ ID NO: 32556 - DNA, 20 bp, Artificial Sequence
  Synthetic
aatgtgctcctcgcgccaga

SEQ ID NO: 32557 - DNA, 20 bp, Artificial Sequence
  Synthetic
tggcgcgaggagcacattga

SEQ ID NO: 32558 - DNA, 20 bp, Artificial Sequence
  Synthetic
cgcgaggagcacattgaagg

SEQ ID NO: 32559 - DNA, 20 bp, Artificial Sequence
  Synthetic
acgggcgatcggtgtttgag

SEQ ID NO: 32560 - DNA, 20 bp, Artificial Sequence
  Synthetic
aatcatgcgcgacgggcgat

SEQ ID NO: 32561 - DNA, 20 bp, Artificial Sequence
  Synthetic
ggtagaaaatcatgcgcgac

SEQ ID NO: 32562 - DNA, 20 bp, Artificial Sequence
  Synthetic
gggtagaaaatcatgcgcga

SEQ ID NO: 32563 - DNA, 20 bp, Artificial Sequence
  Synthetic
tttctacccgccgccgcgcg

SEQ ID NO: 32564 - DNA, 20 bp, Artificial Sequence
  Synthetic
ttctacccgccgccgcgcga

SEQ ID NO: 32565 - DNA, 20 bp, Artificial Sequence
  Synthetic
gcgcgccctcgcgcggcggc

SEQ ID NO: 32566 - DNA, 20 bp, Artificial Sequence
  Synthetic
agcgcgccctcgcgcggcgg

SEQ ID NO: 32567 - DNA, 20 bp, Artificial Sequence
  Synthetic
agcagcgcgccctcgcgcgg

SEQ ID NO: 32568 - DNA, 20 bp, Artificial Sequence
  Synthetic
agcagcagcgcgccctcgcg

SEQ ID NO: 32569 - DNA, 20 bp, Artificial Sequence
  Synthetic
gcgcgagggcgcgctgctgc

SEQ ID NO: 32570 - DNA, 20 bp, Artificial Sequence
  Synthetic
tgctgctggcctcgtacacg

SEQ ID NO: 32571 - DNA, 20 bp, Artificial Sequence
  Synthetic
gctggcctcgtacacgtggt

SEQ ID NO: 32572 - DNA, 20 bp, Artificial Sequence
  Synthetic
cgcgtccgaccacgtgtacg

SEQ ID NO: 32573 - DNA, 20 bp, Artificial Sequence
  Synthetic
ctcgtacacgtggtcggacg

SEQ ID NO: 32574 - DNA, 20 bp, Artificial Sequence
  Synthetic
gtacacgtggtcggacgcgg

SEQ ID NO: 32575 - DNA, 20 bp, Artificial Sequence
  Synthetic
gacgcggcggcagcgttcgc

SEQ ID NO: 32576 - DNA, 20 bp, Artificial Sequence
  Synthetic
cagcgttcgccggcttgagc

SEQ ID NO: 32577 - DNA, 20 bp, Artificial Sequence
  Synthetic
agcgttcgccggcttgagcc

SEQ ID NO: 32578 - DNA, 20 bp, Artificial Sequence
  Synthetic
cgccggcttgagccgggaag

SEQ ID NO: 32579 - DNA, 20 bp, Artificial Sequence
  Synthetic
cgcctcttcccggctcaagc

SEQ ID NO: 32580 - DNA, 20 bp, Artificial Sequence
  Synthetic
ccaagcgcaacgcctcttcc

SEQ ID NO: 32581 - DNA, 20 bp, Artificial Sequence
  Synthetic
ccgggaagaggcgttgcgct

SEQ ID NO: 32582 - DNA, 20 bp, Artificial Sequence
  Synthetic
gcgcttggcgctcgacgacg

SEQ ID NO: 32583 - DNA, 20 bp, Artificial Sequence
  Synthetic
cttggcgctcgacgacgtgg

SEQ ID NO: 32584 - DNA, 20 bp, Artificial Sequence
  Synthetic
gacgacgtggcggcattgca

SEQ ID NO: 32585 - DNA, 20 bp, Artificial Sequence
  Synthetic
acgacgtggcggcattgcac

SEQ ID NO: 32586 - DNA, 20 bp, Artificial Sequence
  Synthetic
ggcctgtcgtgcgccagctc

SEQ ID NO: 32587 - DNA, 20 bp, Artificial Sequence
  Synthetic
gcctgtcgtgcgccagctct

SEQ ID NO: 32588 - DNA, 20 bp, Artificial Sequence
  Synthetic
tcccagagctggcgcacgac

SEQ ID NO: 32589 - DNA, 20 bp, Artificial Sequence
  Synthetic
gtcgtgcgccagctctggga

SEQ ID NO: 32590 - DNA, 20 bp, Artificial Sequence
  Synthetic
cgccagctctgggacggcac

SEQ ID NO: 32591 - DNA, 20 bp, Artificial Sequence
  Synthetic
cgccggtgccgtcccagagc

SEQ ID NO: 32592 - DNA, 20 bp, Artificial Sequence
  Synthetic
gcaccggcgtcgtcaagcgt

SEQ ID NO: 32593 - DNA, 20 bp, Artificial Sequence
  Synthetic
caccggcgtcgtcaagcgtt

SEQ ID NO: 32594 - DNA, 20 bp, Artificial Sequence
  Synthetic
cgcccaacgcttgacgacgc

SEQ ID NO: 32595 - DNA, 20 bp, Artificial Sequence
  Synthetic
cggcgtcgtcaagcgttggg

SEQ ID NO: 32596 - DNA, 20 bp, Artificial Sequence
  Synthetic
cgtcgtcaagcgttgggcgg

SEQ ID NO: 32597 - DNA, 20 bp, Artificial Sequence
  Synthetic
ggcggaggaccagcacagcc

SEQ ID NO: 32598 - DNA, 20 bp, Artificial Sequence
  Synthetic
gcggaggaccagcacagcca

SEQ ID NO: 32599 - DNA, 20 bp, Artificial Sequence
  Synthetic
gaggaccagcacagccaggg

SEQ ID NO: 32600 - DNA, 20 bp, Artificial Sequence
  Synthetic
caaagccaccctggctgtgc

SEQ ID NO: 32601 - DNA, 20 bp, Artificial Sequence
  Synthetic
gcacagccagggtggctttg

SEQ ID NO: 32602 - DNA, 20 bp, Artificial Sequence
  Synthetic
gctgtaccacaaagccaccc

SEQ ID NO: 32603 - DNA, 20 bp, Artificial Sequence
  Synthetic
tggctttgtggtacagccgc

SEQ ID NO: 32604 - DNA, 20 bp, Artificial Sequence
  Synthetic
tggtacagccgccggcgctc

SEQ ID NO: 32605 - DNA, 20 bp, Artificial Sequence
  Synthetic
tcggtttgccagagcgccgg

SEQ ID NO: 32606 - DNA, 20 bp, Artificial Sequence
  Synthetic
ttttcggtttgccagagcgc

SEQ ID NO: 32607 - DNA, 20 bp, Artificial Sequence
  Synthetic
ggcgctctggcaaaccgaaa

SEQ ID NO: 32608 - DNA, 20 bp, Artificial Sequence
  Synthetic
ggcaaaccgaaaaggatgac

SEQ ID NO: 32609 - DNA, 20 bp, Artificial Sequence
  Synthetic
aaccgaaaaggatgactgga

SEQ ID NO: 32610 - DNA, 20 bp, Artificial Sequence
  Synthetic
gaccgtccagtcatcctttt

SEQ ID NO: 32611 - DNA, 20 bp, Artificial Sequence
  Synthetic
gatgactggacggtccctta

SEQ ID NO: 32612 - DNA, 20 bp, Artificial Sequence
  Synthetic
caaagtagatgcggccataa

SEQ ID NO: 32613 - DNA, 20 bp, Artificial Sequence
  Synthetic
gcaaagtagatgcggccata

SEQ ID NO: 32614 - DNA, 20 bp, Artificial Sequence
  Synthetic
tatggccgcatctactttgc

SEQ ID NO: 32615 - DNA, 20 bp, Artificial Sequence
  Synthetic
gctcgccggcaaagtagatg

SEQ ID NO: 32616 - DNA, 20 bp, Artificial Sequence
  Synthetic
cgggtaggcggtgtgctcgc

SEQ ID NO: 32617 - DNA, 20 bp, Artificial Sequence
  Synthetic
gagcacaccgcctacccgca

SEQ ID NO: 32618 - DNA, 20 bp, Artificial Sequence
  Synthetic
acaccgcctacccgcacggc

SEQ ID NO: 32619 - DNA, 20 bp, Artificial Sequence
  Synthetic
caccgcctacccgcacggct

SEQ ID NO: 32620 - DNA, 20 bp, Artificial Sequence
  Synthetic
cacccagccgtgcgggtagg

SEQ ID NO: 32621 - DNA, 20 bp, Artificial Sequence
  Synthetic
cgcctacccgcacggctggg

SEQ ID NO: 32622 - DNA, 20 bp, Artificial Sequence
  Synthetic
ctccacccagccgtgcgggt

SEQ ID NO: 32623 - DNA, 20 bp, Artificial Sequence
  Synthetic
ccgtctccacccagccgtgc

SEQ ID NO: 32624 - DNA, 20 bp, Artificial Sequence
  Synthetic
cccgcacggctgggtggaga

SEQ ID NO: 32625 - DNA, 20 bp, Artificial Sequence
  Synthetic
gccgtctccacccagccgtg

SEQ ID NO: 32626 - DNA, 20 bp, Artificial Sequence
  Synthetic
gcacggctgggtggagacgg

SEQ ID NO: 32627 - DNA, 20 bp, Artificial Sequence
  Synthetic
ggtggagacggcggtcaagt

SEQ ID NO: 32628 - DNA, 20 bp, Artificial Sequence
  Synthetic
ccggctgttgatcttgatgg

SEQ ID NO: 32629 - DNA, 20 bp, Artificial Sequence
  Synthetic
cttccggctgttgatcttga

SEQ ID NO: 32630 - DNA, 20 bp, Artificial Sequence
  Synthetic
ctggttgcacagacagtacg

SEQ ID NO: 32631 - DNA, 20 bp, Artificial Sequence
  Synthetic
cacgtactgtctgtgcaacc

SEQ ID NO: 32632 - DNA, 20 bp, Artificial Sequence
  Synthetic
ctgtgcaaccaggtctccta

SEQ ID NO: 32633 - DNA, 20 bp, Artificial Sequence
  Synthetic
tgtgcaaccaggtctcctat

SEQ ID NO: 32634 - DNA, 20 bp, Artificial Sequence
  Synthetic
gtgcaaccaggtctcctatg

SEQ ID NO: 32635 - DNA, 20 bp, Artificial Sequence
  Synthetic
tcatctccccataggagacc

SEQ ID NO: 32636 - DNA, 20 bp, Artificial Sequence
  Synthetic
gtctcctatggggagatgat

SEQ ID NO: 32637 - DNA, 20 bp, Artificial Sequence
  Synthetic
gcagccgatcatctccccat

SEQ ID NO: 32638 - DNA, 20 bp, Artificial Sequence
  Synthetic
acgacgagtgccccatcgag

SEQ ID NO: 32639 - DNA, 20 bp, Artificial Sequence
  Synthetic
agaagtggaaccactcgatg

SEQ ID NO: 32640 - DNA, 20 bp, Artificial Sequence
  Synthetic
gagaagtggaaccactcgat

SEQ ID NO: 32641 - DNA, 20 bp, Artificial Sequence
  Synthetic
cgagaagtggaaccactcga

SEQ ID NO: 32642 - DNA, 20 bp, Artificial Sequence
  Synthetic
gtggttccacttctcgtgcg

SEQ ID NO: 32643 - DNA, 20 bp, Artificial Sequence
  Synthetic
tggttccacttctcgtgcgt

SEQ ID NO: 32644 - DNA, 20 bp, Artificial Sequence
  Synthetic
ggttccacttctcgtgcgtg

SEQ ID NO: 32645 - DNA, 20 bp, Artificial Sequence
  Synthetic
tgagccccacgcacgagaag

SEQ ID NO: 32646 - DNA, 20 bp, Artificial Sequence
  Synthetic
ggggctcaatcataaaccca

SEQ ID NO: 32647 - DNA, 20 bp, Artificial Sequence
  Synthetic
gggctcaatcataaacccaa

SEQ ID NO: 32648 - DNA, 20 bp, Artificial Sequence
  Synthetic
atcataaacccaagggcaag

SEQ ID NO: 32649 - DNA, 20 bp, Artificial Sequence
  Synthetic
ggacagtaccacttgccctt

SEQ ID NO: 32650 - DNA, 20 bp, Artificial Sequence
  Synthetic
gggacagtaccacttgccct

SEQ ID NO: 32651 - DNA, 20 bp, Artificial Sequence
  Synthetic
agtggtactgtcccaagtgc

SEQ ID NO: 32652 - DNA, 20 bp, Artificial Sequence
  Synthetic
gtggtactgtcccaagtgcc

SEQ ID NO: 32653 - DNA, 20 bp, Artificial Sequence
  Synthetic
tggtactgtcccaagtgccg

SEQ ID NO: 32654 - DNA, 20 bp, Artificial Sequence
  Synthetic
ggtactgtcccaagtgccgg

SEQ ID NO: 32655 - DNA, 20 bp, Artificial Sequence
  Synthetic
gtactgtcccaagtgccggg

SEQ ID NO: 32656 - DNA, 20 bp, Artificial Sequence
  Synthetic
tcgttctccccccggcactt

SEQ ID NO: 32657 - DNA, 20 bp, Artificial Sequence
  Synthetic
ctcgttctccccccggcact

SEQ ID NO: 32658 - DNA, 20 bp, Artificial Sequence
  Synthetic
gctccacctggtgaactatg

SEQ ID NO: 32659 - DNA, 20 bp, Artificial Sequence
  Synthetic
ccacctggtgaactatgtgg

SEQ ID NO: 32660 - DNA, 20 bp, Artificial Sequence
  Synthetic
gaactatgtggaggactacc

SEQ ID NO: 32661 - DNA, 20 bp, Artificial Sequence
  Synthetic
gcagggactcgatggagtcc

SEQ ID NO: 32662 - DNA, 20 bp, Artificial Sequence
  Synthetic
gtcgaaaggcagggactcga

SEQ ID NO: 32663 - DNA, 20 bp, Artificial Sequence
  Synthetic
tctctgcaagtcgaaaggca

SEQ ID NO: 32664 - DNA, 20 bp, Artificial Sequence
  Synthetic
ttctctgcaagtcgaaaggc

SEQ ID NO: 32665 - DNA, 20 bp, Artificial Sequence
  Synthetic
acatttctctgcaagtcgaa

SEQ ID NO: 32666 - DNA, 20 bp, Artificial Sequence
  Synthetic
agagaaatgtctcgctgatg

SEQ ID NO: 32667 - DNA, 20 bp, Artificial Sequence
  Synthetic
gagaaatgtctcgctgatgc

SEQ ID NO: 32668 - DNA, 20 bp, Artificial Sequence
  Synthetic
gagatcgacgcgaaatacca

SEQ ID NO: 32669 - DNA, 20 bp, Artificial Sequence
  Synthetic
cttgcccccagagatcctga

SEQ ID NO: 32670 - DNA, 20 bp, Artificial Sequence
  Synthetic
tctagctccttcaggatctc

SEQ ID NO: 32671 - DNA, 20 bp, Artificial Sequence
  Synthetic
agcactcgtctagctccttc

SEQ ID NO: 32672 - DNA, 20 bp, Artificial Sequence
  Synthetic
cgcttcagtcgcgagacaga

SEQ ID NO: 32673 - DNA, 20 bp, Artificial Sequence
  Synthetic
gcttcagtcgcgagacagac

SEQ ID NO: 32674 - DNA, 20 bp, Artificial Sequence
  Synthetic
cttcagtcgcgagacagacg

SEQ ID NO: 32675 - DNA, 20 bp, Artificial Sequence
  Synthetic
agacagacggggcgcagaag

SEQ ID NO: 32676 - DNA, 20 bp, Artificial Sequence
  Synthetic
cagacggggcgcagaagcgg

SEQ ID NO: 32677 - DNA, 20 bp, Artificial Sequence
  Synthetic
gcgcgcgctgatccgcagcc

SEQ ID NO: 32678 - DNA, 20 bp, Artificial Sequence
  Synthetic
gctgatccgcagccaggagc

SEQ ID NO: 32679 - DNA, 20 bp, Artificial Sequence
  Synthetic
ctgatccgcagccaggagct

SEQ ID NO: 32680 - DNA, 20 bp, Artificial Sequence
  Synthetic
cgtcgcccagctcctggctg

SEQ ID NO: 32681 - DNA, 20 bp, Artificial Sequence
  Synthetic
tcttctcgtcgcccagctcc

SEQ ID NO: 32682 - DNA, 20 bp, Artificial Sequence
  Synthetic
gatccagatcgtgagccaga

SEQ ID NO: 32683 - DNA, 20 bp, Artificial Sequence
  Synthetic
ccaccatctggctcacgatc

SEQ ID NO: 32684 - DNA, 20 bp, Artificial Sequence
  Synthetic
ccagatcgtgagccagatgg

SEQ ID NO: 32685 - DNA, 20 bp, Artificial Sequence
  Synthetic
cgtgagccagatggtggagc

SEQ ID NO: 32686 - DNA, 20 bp, Artificial Sequence
  Synthetic
gagccagatggtggagctgg

SEQ ID NO: 32687 - DNA, 20 bp, Artificial Sequence
  Synthetic
tctccaccagctccaccatc

SEQ ID NO: 32688 - DNA, 20 bp, Artificial Sequence
  Synthetic
agctggtggagaaccgcacg

SEQ ID NO: 32689 - DNA, 20 bp, Artificial Sequence
  Synthetic
ggtggagaaccgcacgcggc

SEQ ID NO: 32690 - DNA, 20 bp, Artificial Sequence
  Synthetic
ggagaaccgcacgcggcagg

SEQ ID NO: 32691 - DNA, 20 bp, Artificial Sequence
  Synthetic
ggctgtccacctgccgcgtg

SEQ ID NO: 32692 - DNA, 20 bp, Artificial Sequence
  Synthetic
gcggcaggtggacagccacg

SEQ ID NO: 32693 - DNA, 20 bp, Artificial Sequence
  Synthetic
cagccacgtggagctgttcg

SEQ ID NO: 32694 - DNA, 20 bp, Artificial Sequence
  Synthetic
gcgcctcgaacagctccacg

SEQ ID NO: 32695 - DNA, 20 bp, Artificial Sequence
  Synthetic
ttatgcaaccaagtgtctta

SEQ ID NO: 32696 - DNA, 20 bp, Artificial Sequence
  Synthetic
tatgcaaccaagtgtcttat

SEQ ID NO: 32697 - DNA, 20 bp, Artificial Sequence
  Synthetic
atgcaaccaagtgtcttatg

SEQ ID NO: 32698 - DNA, 20 bp, Artificial Sequence
  Synthetic
tcatctccccataagacact

SEQ ID NO: 32699 - DNA, 20 bp, Artificial Sequence
  Synthetic
gtgtcttatggggagatgat

SEQ ID NO: 32700 - DNA, 20 bp, Artificial Sequence
  Synthetic
atgaacagtgtccaattgaa

SEQ ID NO: 32701 - DNA, 20 bp, Artificial Sequence
  Synthetic
gaaaagtgaaaccattcaat

SEQ ID NO: 32702 - DNA, 20 bp, Artificial Sequence
  Synthetic
ttcacttacctataaaccaa

SEQ ID NO: 32703 - DNA, 20 bp, Artificial Sequence
  Synthetic
tcacttacctataaaccaaa

SEQ ID NO: 32704 - DNA, 20 bp, Artificial Sequence
  Synthetic
cacttacctataaaccaaag

SEQ ID NO: 32705 - DNA, 20 bp, Artificial Sequence
  Synthetic
ccatttcccctttggtttat

SEQ ID NO: 32706 - DNA, 20 bp, Artificial Sequence
  Synthetic
cctataaaccaaaggggaaa

SEQ ID NO: 32707 - DNA, 20 bp, Artificial Sequence
  Synthetic
gggcaataccatttcccctt

SEQ ID NO: 32708 - DNA, 20 bp, Artificial Sequence
  Synthetic
aatggtattgcccaaagtgc

SEQ ID NO: 32709 - DNA, 20 bp, Artificial Sequence
  Synthetic
atggtattgcccaaagtgca

SEQ ID NO: 32710 - DNA, 20 bp, Artificial Sequence
  Synthetic
tggtattgcccaaagtgcag

SEQ ID NO: 32711 - DNA, 20 bp, Artificial Sequence
  Synthetic
cattatctcccctgcacttt

SEQ ID NO: 32712 - DNA, 20 bp, Artificial Sequence
  Synthetic
tcattatctcccctgcactt

SEQ ID NO: 32713 - DNA, 20 bp, Artificial Sequence
  Synthetic
gctgctcacctgctacgtgc

SEQ ID NO: 32714 - DNA, 20 bp, Artificial Sequence
  Synthetic
aaggtagtcctgcacgtagc

SEQ ID NO: 32715 - DNA, 20 bp, Artificial Sequence
  Synthetic
gcaggactaccttgagtgcg

SEQ ID NO: 32716 - DNA, 20 bp, Artificial Sequence
  Synthetic
gcagcgactccacgcactca

SEQ ID NO: 32717 - DNA, 20 bp, Artificial Sequence
  Synthetic
cgctgccccacgacatgcag

SEQ ID NO: 32718 - DNA, 20 bp, Artificial Sequence
  Synthetic
acgttcctctgcatgtcgtg

SEQ ID NO: 32719 - DNA, 20 bp, Artificial Sequence
  Synthetic
cacgttcctctgcatgtcgt

SEQ ID NO: 32720 - DNA, 20 bp, Artificial Sequence
  Synthetic
acacgttcctctgcatgtcg

SEQ ID NO: 32721 - DNA, 20 bp, Artificial Sequence
  Synthetic
cgtgtctgtgctgcgagagc

SEQ ID NO: 32722 - DNA, 20 bp, Artificial Sequence
  Synthetic
gagctggacaacaaatatca

SEQ ID NO: 32723 - DNA, 20 bp, Artificial Sequence
  Synthetic
tggacaacaaatatcaaggt

SEQ ID NO: 32724 - DNA, 20 bp, Artificial Sequence
  Synthetic
cctttttttagaaacgttaa

SEQ ID NO: 32725 - DNA, 20 bp, Artificial Sequence
  Synthetic
gctgctgtagacgtttcttc

SEQ ID NO: 32726 - DNA, 20 bp, Artificial Sequence
  Synthetic
gactattaattagtgctctc

SEQ ID NO: 32727 - DNA, 20 bp, Artificial Sequence
  Synthetic
actaattaatagtcaagaat

SEQ ID NO: 32728 - DNA, 20 bp, Artificial Sequence
  Synthetic
ctaattaatagtcaagaatt

SEQ ID NO: 32729 - DNA, 20 bp, Artificial Sequence
  Synthetic
tgttacacaaatgctcgaat

SEQ ID NO: 32730 - DNA, 20 bp, Artificial Sequence
  Synthetic
tacacaaatgctcgaattgg

SEQ ID NO: 32731 - DNA, 20 bp, Artificial Sequence
  Synthetic
tgctcgaattggtggaaaat

SEQ ID NO: 32732 - DNA, 20 bp, Artificial Sequence
  Synthetic
gctcgaattggtggaaaatc

SEQ ID NO: 32733 - DNA, 20 bp, Artificial Sequence
  Synthetic
ggaaaatcgggcaagacaaa

SEQ ID NO: 32734 - DNA, 20 bp, Artificial Sequence
  Synthetic
tcgatactgcatttgtaatc

SEQ ID NO: 32735 - DNA, 20 bp, Artificial Sequence
  Synthetic
ttttttaactaggtatctta

SEQ ID NO: 32736 - DNA, 20 bp, Artificial Sequence
  Synthetic
ctaggtatcttatggtgaga

SEQ ID NO: 32737 - DNA, 20 bp, Artificial Sequence
  Synthetic
ggtatcttatggtgagatgg

SEQ ID NO: 32738 - DNA, 20 bp, Artificial Sequence
  Synthetic
gtatcttatggtgagatggt

SEQ ID NO: 32739 - DNA, 20 bp, Artificial Sequence
  Synthetic
aaaatgtaatacttacatct

SEQ ID NO: 32740 - DNA, 20 bp, Artificial Sequence
  Synthetic
ctttctagtgccctatagaa

SEQ ID NO: 32741 - DNA, 20 bp, Artificial Sequence
  Synthetic
cataatggaaccattctata

SEQ ID NO: 32742 - DNA, 20 bp, Artificial Sequence
  Synthetic
ccataatggaaccattctat

SEQ ID NO: 32743 - DNA, 20 bp, Artificial Sequence
  Synthetic
cctatagaatggttccatta

SEQ ID NO: 32744 - DNA, 20 bp, Artificial Sequence
  Synthetic
tggttccattatggctgcgt

SEQ ID NO: 32745 - DNA, 20 bp, Artificial Sequence
  Synthetic
tcaatccaacgcagccataa

SEQ ID NO: 32746 - DNA, 20 bp, Artificial Sequence
  Synthetic
tggctgcgttggattgacag

SEQ ID NO: 32747 - DNA, 20 bp, Artificial Sequence
  Synthetic
ggattgacagaggcaccaaa

SEQ ID NO: 32748 - DNA, 20 bp, Artificial Sequence
  Synthetic
cagaggcaccaaaaggcaaa

SEQ ID NO: 32749 - DNA, 20 bp, Artificial Sequence
  Synthetic
ggacagtaccatttgccttt

SEQ ID NO: 32750 - DNA, 20 bp, Artificial Sequence
  Synthetic
ttcattgcagcagtgcactg

SEQ ID NO: 32751 - DNA, 20 bp, Artificial Sequence
  Synthetic
gttgtacctagaagactatc

SEQ ID NO: 32752 - DNA, 20 bp, Artificial Sequence
  Synthetic
cactttccagatagtcttct

SEQ ID NO: 32753 - DNA, 20 bp, Artificial Sequence
  Synthetic
agtgattgagcagcttccta

SEQ ID NO: 32754 - DNA, 20 bp, Artificial Sequence
  Synthetic
agcagcttcctatggatctg

SEQ ID NO: 32755 - DNA, 20 bp, Artificial Sequence
  Synthetic
gcagcttcctatggatctgc

SEQ ID NO: 32756 - DNA, 20 bp, Artificial Sequence
  Synthetic
aagcggtcccgcagatccat

SEQ ID NO: 32757 - DNA, 20 bp, Artificial Sequence
  Synthetic
ggatctgcgggaccgcttca

SEQ ID NO: 32758 - DNA, 20 bp, Artificial Sequence
  Synthetic
tctcgcgcatttccgtgaag

SEQ ID NO: 32759 - DNA, 20 bp, Artificial Sequence
  Synthetic
cttcacggaaatgcgcgaga

SEQ ID NO: 32760 - DNA, 20 bp, Artificial Sequence
  Synthetic
aatgcgcgagatggacctgc

SEQ ID NO: 32761 - DNA, 20 bp, Artificial Sequence
  Synthetic
ccgacttactctgcacctgc

SEQ ID NO: 32762 - DNA, 20 bp, Artificial Sequence
  Synthetic
ttattatgtcatagatgcaa

SEQ ID NO: 32763 - DNA, 20 bp, Artificial Sequence
  Synthetic
caaagaaaaataaacctgag

SEQ ID NO: 32764 - DNA, 20 bp, Artificial Sequence
  Synthetic
agaaaaataaacctgagtgg

SEQ ID NO: 32765 - DNA, 20 bp, Artificial Sequence
  Synthetic
gaaaaataaacctgagtgga

SEQ ID NO: 32766 - DNA, 20 bp, Artificial Sequence
  Synthetic
atttgctcttccctccactc

SEQ ID NO: 32767 - DNA, 20 bp, Artificial Sequence
  Synthetic
tgagtggagggaagagcaaa

SEQ ID NO: 32768 - DNA, 20 bp, Artificial Sequence
  Synthetic
tgttgcacatacttttttga

SEQ ID NO: 32769 - DNA, 20 bp, Artificial Sequence
  Synthetic
tcaggactactataaagctt

SEQ ID NO: 32770 - DNA, 20 bp, Artificial Sequence
  Synthetic
tttggaagatgcagatgaga

SEQ ID NO: 32771 - DNA, 20 bp, Artificial Sequence
  Synthetic
tgcagatgagaaggttcagt

SEQ ID NO: 32772 - DNA, 20 bp, Artificial Sequence
  Synthetic
ggcaaaccagatatatgact

SEQ ID NO: 32773 - DNA, 20 bp, Artificial Sequence
  Synthetic
tacttaccaagtcatatatc

SEQ ID NO: 32774 - DNA, 20 bp, Artificial Sequence
  Synthetic
agatcgacacttgagaaagc

SEQ ID NO: 32775 - DNA, 20 bp, Artificial Sequence
  Synthetic
acacttgagaaagctggatc

SEQ ID NO: 32776 - DNA, 20 bp, Artificial Sequence
  Synthetic
gagaaagctggatcaggaac

SEQ ID NO: 32777 - DNA, 20 bp, Artificial Sequence
  Synthetic
ctggtgacaaaggcaatagg

SEQ ID NO: 32778 - DNA, 20 bp, Artificial Sequence
  Synthetic
cacctattgcctttgtcacc

SEQ ID NO: 32779 - DNA, 20 bp, Artificial Sequence
  Synthetic
gacctggtgacaaaggcaat

SEQ ID NO: 32780 - DNA, 20 bp, Artificial Sequence
  Synthetic
cataggagacctggtgacaa

SEQ ID NO: 32781 - DNA, 20 bp, Artificial Sequence
  Synthetic
ctttgtcaccaggtctccta

SEQ ID NO: 32782 - DNA, 20 bp, Artificial Sequence
  Synthetic
tcatctctccataggagacc

SEQ ID NO: 32783 - DNA, 20 bp, Artificial Sequence
  Synthetic
gtctcctatggagagatgat

SEQ ID NO: 32784 - DNA, 20 bp, Artificial Sequence
  Synthetic
acagccaatcatctctccat

SEQ ID NO: 32785 - DNA, 20 bp, Artificial Sequence
  Synthetic
gcaaaatgtttctcacatca

SEQ ID NO: 32786 - DNA, 20 bp, Artificial Sequence
  Synthetic
ggcaaaatgtttctcacatc

SEQ ID NO: 32787 - DNA, 20 bp, Artificial Sequence
  Synthetic
tcttccagtgttccattgag

SEQ ID NO: 32788 - DNA, 20 bp, Artificial Sequence
  Synthetic
ggaaccactcaatggaacac

SEQ ID NO: 32789 - DNA, 20 bp, Artificial Sequence
  Synthetic
ggcaaaatggaaccactcaa

SEQ ID NO: 32790 - DNA, 20 bp, Artificial Sequence
  Synthetic
gtggttccattttgcctgtg

SEQ ID NO: 32791 - DNA, 20 bp, Artificial Sequence
  Synthetic
tggttccattttgcctgtgt

SEQ ID NO: 32792 - DNA, 20 bp, Artificial Sequence
  Synthetic
ggttccattttgcctgtgtg

SEQ ID NO: 32793 - DNA, 20 bp, Artificial Sequence
  Synthetic
tcagccccacacaggcaaaa

SEQ ID NO: 32794 - DNA, 20 bp, Artificial Sequence
  Synthetic
cttggttgtcagccccacac

SEQ ID NO: 32795 - DNA, 20 bp, Artificial Sequence
  Synthetic
tggggctgacaaccaagcct

SEQ ID NO: 32796 - DNA, 20 bp, Artificial Sequence
  Synthetic
ggggctgacaaccaagcctc

SEQ ID NO: 32797 - DNA, 20 bp, Artificial Sequence
  Synthetic
gggctgacaaccaagcctcg

SEQ ID NO: 32798 - DNA, 20 bp, Artificial Sequence
  Synthetic
ggctgacaaccaagcctcgg

SEQ ID NO: 32799 - DNA, 20 bp, Artificial Sequence
  Synthetic
caaccaagcctcgggggaaa

SEQ ID NO: 32800 - DNA, 20 bp, Artificial Sequence
  Synthetic
ttaccatttcccccgaggct

SEQ ID NO: 32801 - DNA, 20 bp, Artificial Sequence
  Synthetic
gccacttaccatttcccccg

SEQ ID NO: 32802 - DNA, 20 bp, Artificial Sequence
  Synthetic
tccgttcttgggagcagcgt

SEQ ID NO: 32803 - DNA, 20 bp, Artificial Sequence
  Synthetic
ttccgttcttgggagcagcg

SEQ ID NO: 32804 - DNA, 20 bp, Artificial Sequence
  Synthetic
gatggctgcggggatgtatt

SEQ ID NO: 32805 - DNA, 20 bp, Artificial Sequence
  Synthetic
gatgtatttggaacattatc

SEQ ID NO: 32806 - DNA, 20 bp, Artificial Sequence
  Synthetic
ttctctgtaattcaaaggga

SEQ ID NO: 32807 - DNA, 20 bp, Artificial Sequence
  Synthetic
aagtttctctgtaattcaaa

SEQ ID NO: 32808 - DNA, 20 bp, Artificial Sequence
  Synthetic
aaagtttctctgtaattcaa

SEQ ID NO: 32809 - DNA, 20 bp, Artificial Sequence
  Synthetic
agagaaactttcagctcatg

SEQ ID NO: 32810 - DNA, 20 bp, Artificial Sequence
  Synthetic
gagaaactttcagctcatga

SEQ ID NO: 32811 - DNA, 20 bp, Artificial Sequence
  Synthetic
ggacctagaccaaagaacag

SEQ ID NO: 32812 - DNA, 20 bp, Artificial Sequence
  Synthetic
gacctagaccaaagaacaga

SEQ ID NO: 32813 - DNA, 20 bp, Artificial Sequence
  Synthetic
taccctctgttctttggtct

SEQ ID NO: 32814 - DNA, 20 bp, Artificial Sequence
  Synthetic
tatacataccctctgttctt

SEQ ID NO: 32815 - DNA, 20 bp, Artificial Sequence
  Synthetic
tgtctctgttgtagacctga

SEQ ID NO: 32816 - DNA, 20 bp, Artificial Sequence
  Synthetic
acttgtcaatttcagccttc

SEQ ID NO: 32817 - DNA, 20 bp, Artificial Sequence
  Synthetic
gaaggctgaaattgacaagt

SEQ ID NO: 32818 - DNA, 20 bp, Artificial Sequence
  Synthetic
ggcactactcatatactcag

SEQ ID NO: 32819 - DNA, 20 bp, Artificial Sequence
  Synthetic
tgcccgcagcctgagctccg

SEQ ID NO: 32820 - DNA, 20 bp, Artificial Sequence
  Synthetic
ttcctcggagctcaggctgc

SEQ ID NO: 32821 - DNA, 20 bp, Artificial Sequence
  Synthetic
tttcctcggagctcaggctg

SEQ ID NO: 32822 - DNA, 20 bp, Artificial Sequence
  Synthetic
ccaatttttcctcggagctc

SEQ ID NO: 32823 - DNA, 20 bp, Artificial Sequence
  Synthetic
cctgagctccgaggaaaaat

SEQ ID NO: 32824 - DNA, 20 bp, Artificial Sequence
  Synthetic
gagaagggccaatttttcct

SEQ ID NO: 32825 - DNA, 20 bp, Artificial Sequence
  Synthetic
ggcccttctcaaacagatcc

SEQ ID NO: 32826 - DNA, 20 bp, Artificial Sequence
  Synthetic
ttcctggatctgtttgagaa

SEQ ID NO: 32827 - DNA, 20 bp, Artificial Sequence
  Synthetic
cttcctggatctgtttgaga

SEQ ID NO: 32828 - DNA, 20 bp, Artificial Sequence
  Synthetic
aaacagatccaggaagccta

SEQ ID NO: 32829 - DNA, 20 bp, Artificial Sequence
  Synthetic
tgcacttgccataggcttcc

SEQ ID NO: 32830 - DNA, 20 bp, Artificial Sequence
  Synthetic
ggaagcctatggcaagtgca

SEQ ID NO: 32831 - DNA, 20 bp, Artificial Sequence
  Synthetic
aaattccttgcacttgccat

SEQ ID NO: 32832 - DNA, 20 bp, Artificial Sequence
  Synthetic
tatggcaagtgcaaggaatt

SEQ ID NO: 32833 - DNA, 20 bp, Artificial Sequence
  Synthetic
caaggaatttggtgacgaca

SEQ ID NO: 32834 - DNA, 20 bp, Artificial Sequence
  Synthetic
tgccatgcagacctatgaga

SEQ ID NO: 32835 - DNA, 20 bp, Artificial Sequence
  Synthetic
taccatctcataggtctgca

SEQ ID NO: 32836 - DNA, 20 bp, Artificial Sequence
  Synthetic
acagggccataccatctcat

SEQ ID NO: 32837 - DNA, 20 bp, Artificial Sequence
  Synthetic
cccaggtggacaaacacatt

SEQ ID NO: 32838 - DNA, 20 bp, Artificial Sequence
  Synthetic
gccgaatgtgtttgtccacc

SEQ ID NO: 32839 - DNA, 20 bp, Artificial Sequence
  Synthetic
aggtggacaaacacattcgg

SEQ ID NO: 32840 - DNA, 20 bp, Artificial Sequence
  Synthetic
ggacaaacacattcggcggc

SEQ ID NO: 32841 - DNA, 20 bp, Artificial Sequence
  Synthetic
tcggcggctggacacagacc

SEQ ID NO: 32842 - DNA, 20 bp, Artificial Sequence
  Synthetic
cacagacctggcccgttttg

SEQ ID NO: 32843 - DNA, 20 bp, Artificial Sequence
  Synthetic
gatcagcctcaaaacgggcc

SEQ ID NO: 32844 - DNA, 20 bp, Artificial Sequence
  Synthetic
cttgagatcagcctcaaaac

SEQ ID NO: 32845 - DNA, 20 bp, Artificial Sequence
  Synthetic
ccttgagatcagcctcaaaa

SEQ ID NO: 32846 - DNA, 20 bp, Artificial Sequence
  Synthetic
ctggtggcacaggcagtacg

SEQ ID NO: 32847 - DNA, 20 bp, Artificial Sequence
  Synthetic
cacgtactgcctgtgccacc

SEQ ID NO: 32848 - DNA, 20 bp, Artificial Sequence
  Synthetic
cataggagacctggtggcac

SEQ ID NO: 32849 - DNA, 20 bp, Artificial Sequence
  Synthetic
ctgtgccaccaggtctccta

SEQ ID NO: 32850 - DNA, 20 bp, Artificial Sequence
  Synthetic
tgtgccaccaggtctcctat

SEQ ID NO: 32851 - DNA, 20 bp, Artificial Sequence
  Synthetic
gtgccaccaggtctcctatg

SEQ ID NO: 32852 - DNA, 20 bp, Artificial Sequence
  Synthetic
tctccccataggagacctgg

SEQ ID NO: 32853 - DNA, 20 bp, Artificial Sequence
  Synthetic
tcatctccccataggagacc

SEQ ID NO: 32854 - DNA, 20 bp, Artificial Sequence
  Synthetic
gtctcctatggggagatgat

SEQ ID NO: 32855 - DNA, 20 bp, Artificial Sequence
  Synthetic
acagccaatcatctccccat

SEQ ID NO: 32856 - DNA, 20 bp, Artificial Sequence
  Synthetic
ctgcaggcgacactcacgtc

SEQ ID NO: 32857 - DNA, 20 bp, Artificial Sequence
  Synthetic
ctttgcagtgtccaattgag

SEQ ID NO: 32858 - DNA, 20 bp, Artificial Sequence
  Synthetic
gcaaagtgaaaccactcaat

SEQ ID NO: 32859 - DNA, 20 bp, Artificial Sequence
  Synthetic
gtggtttcactttgcctgcg

SEQ ID NO: 32860 - DNA, 20 bp, Artificial Sequence
  Synthetic
tttcgtggtaaggtccacgc

SEQ ID NO: 32861 - DNA, 20 bp, Artificial Sequence
  Synthetic
gaccttaccacgaaacccaa

SEQ ID NO: 32862 - DNA, 20 bp, Artificial Sequence
  Synthetic
ttcctttgggtttcgtggta

SEQ ID NO: 32863 - DNA, 20 bp, Artificial Sequence
  Synthetic
ccattttcctttgggtttcg

SEQ ID NO: 32864 - DNA, 20 bp, Artificial Sequence
  Synthetic
ccacgaaacccaaaggaaaa

SEQ ID NO: 32865 - DNA, 20 bp, Artificial Sequence
  Synthetic
cacactcaccattttccttt

SEQ ID NO: 32866 - DNA, 20 bp, Artificial Sequence
  Synthetic
ccacactcaccattttcctt

SEQ ID NO: 32867 - DNA, 20 bp, Artificial Sequence
  Synthetic
cttgtcacaggttctgtcca

SEQ ID NO: 32868 - DNA, 20 bp, Artificial Sequence
  Synthetic
gttctgtccacggtgtgtcc

SEQ ID NO: 32869 - DNA, 20 bp, Artificial Sequence
  Synthetic
ctcttttcctggacacaccg

SEQ ID NO: 32870 - DNA, 20 bp, Artificial Sequence
  Synthetic
gatggcgaccgccatgtact

SEQ ID NO: 32871 - DNA, 20 bp, Artificial Sequence
  Synthetic
atagtgctccaagtacatgg

SEQ ID NO: 32872 - DNA, 20 bp, Artificial Sequence
  Synthetic
cagatagtgctccaagtaca

SEQ ID NO: 32873 - DNA, 20 bp, Artificial Sequence
  Synthetic
catgtacttggagcactatc

SEQ ID NO: 32874 - DNA, 20 bp, Artificial Sequence
  Synthetic
accttccctgcgaacttcag

SEQ ID NO: 32875 - DNA, 20 bp, Artificial Sequence
  Synthetic
tcctctgaagttcgcaggga

SEQ ID NO: 32876 - DNA, 20 bp, Artificial Sequence
  Synthetic
aagttcctctgaagttcgca

SEQ ID NO: 32877 - DNA, 20 bp, Artificial Sequence
  Synthetic
gaagttcctctgaagttcgc

SEQ ID NO: 32878 - DNA, 20 bp, Artificial Sequence
  Synthetic
cttccagctgatgcgagagc

SEQ ID NO: 32879 - DNA, 20 bp, Artificial Sequence
  Synthetic
ggtccagctctcgcatcagc

SEQ ID NO: 32880 - DNA, 20 bp, Artificial Sequence
  Synthetic
tgatgcgagagctggaccag

SEQ ID NO: 32881 - DNA, 20 bp, Artificial Sequence
  Synthetic
gcgagagctggaccagagga

SEQ ID NO: 32882 - DNA, 20 bp, Artificial Sequence
  Synthetic
gagctggaccagaggacgga

SEQ ID NO: 32883 - DNA, 20 bp, Artificial Sequence
  Synthetic
ctggaccagaggacggaagg

SEQ ID NO: 32884 - DNA, 20 bp, Artificial Sequence
  Synthetic
tggaccagaggacggaaggt

SEQ ID NO: 32885 - DNA, 20 bp, Artificial Sequence
  Synthetic
tgaacccaccttccgtcctc

SEQ ID NO: 32886 - DNA, 20 bp, Artificial Sequence
  Synthetic
gaaagcagagattgacatcc

SEQ ID NO: 32887 - DNA, 20 bp, Artificial Sequence
  Synthetic
tggagatgtactctgcagcc

SEQ ID NO: 32888 - DNA, 20 bp, Artificial Sequence
  Synthetic
ggctgcagagtacatctcca

SEQ ID NO: 32889 - DNA, 20 bp, Artificial Sequence
  Synthetic
tggagacagcgtcttcaccg

SEQ ID NO: 32890 - DNA, 20 bp, Artificial Sequence
  Synthetic
gctgtctccagaccagcgcg

SEQ ID NO: 32891 - DNA, 20 bp, Artificial Sequence
  Synthetic
aggcgctccacgcgctggtc

SEQ ID NO: 32892 - DNA, 20 bp, Artificial Sequence
  Synthetic
tctgcaggcgctccacgcgc

SEQ ID NO: 32893 - DNA, 20 bp, Artificial Sequence
  Synthetic
aggcgttctggatcttctgc

SEQ ID NO: 32894 - DNA, 20 bp, Artificial Sequence
  Synthetic
tgcacttgctgtaggcgttc

SEQ ID NO: 32895 - DNA, 20 bp, Artificial Sequence
  Synthetic
gaacgcctacagcaagtgca

SEQ ID NO: 32896 - DNA, 20 bp, Artificial Sequence
  Synthetic
gtattccttgcacttgctgt

SEQ ID NO: 32897 - DNA, 20 bp, Artificial Sequence
  Synthetic
cagtgacgacaaagtgcagc

SEQ ID NO: 32898 - DNA, 20 bp, Artificial Sequence
  Synthetic
ggccatgcagacctacgaga

SEQ ID NO: 32899 - DNA, 20 bp, Artificial Sequence
  Synthetic
caccatctcgtaggtctgca

SEQ ID NO: 32900 - DNA, 20 bp, Artificial Sequence
  Synthetic
ccccgccctcaccatctcgt

SEQ ID NO: 32901 - DNA, 20 bp, Artificial Sequence
  Synthetic
aggtggataaacacattcga

SEQ ID NO: 32902 - DNA, 20 bp, Artificial Sequence
  Synthetic
tcgaaggcttgatgcagacc

SEQ ID NO: 32903 - DNA, 20 bp, Artificial Sequence
  Synthetic
gatctgcttcaaagcgcgcc

SEQ ID NO: 32904 - DNA, 20 bp, Artificial Sequence
  Synthetic
ttgaaaggttatcaactgaa

SEQ ID NO: 32905 - DNA, 20 bp, Artificial Sequence
  Synthetic
atcaactgaaaggcatgaat

SEQ ID NO: 32906 - DNA, 20 bp, Artificial Sequence
  Synthetic
actgaaaggcatgaattggt

SEQ ID NO: 32907 - DNA, 20 bp, Artificial Sequence
  Synthetic
gttggccaatctatatgaac

SEQ ID NO: 32908 - DNA, 20 bp, Artificial Sequence
  Synthetic
attcacctgttcatatagat

SEQ ID NO: 32909 - DNA, 20 bp, Artificial Sequence
  Synthetic
ttttttccccagggtattaa

SEQ ID NO: 32910 - DNA, 20 bp, Artificial Sequence
  Synthetic
caagaatgccattaataccc

SEQ ID NO: 32911 - DNA, 20 bp, Artificial Sequence
  Synthetic
tggcattcttgctgatgaaa

SEQ ID NO: 32912 - DNA, 20 bp, Artificial Sequence
  Synthetic
ggcattcttgctgatgaaat

SEQ ID NO: 32913 - DNA, 20 bp, Artificial Sequence
  Synthetic
cttgctgatgaaatgggcct

SEQ ID NO: 32914 - DNA, 20 bp, Artificial Sequence
  Synthetic
tgctctgtactgttttacca

SEQ ID NO: 32915 - DNA, 20 bp, Artificial Sequence
  Synthetic
agtacagagcattgcccttc

SEQ ID NO: 32916 - DNA, 20 bp, Artificial Sequence
  Synthetic
cattgcccttctggcccatc

SEQ ID NO: 32917 - DNA, 20 bp, Artificial Sequence
  Synthetic
ctcagccagatgggccagaa

SEQ ID NO: 32918 - DNA, 20 bp, Artificial Sequence
  Synthetic
cctcagccagatgggccaga

SEQ ID NO: 32919 - DNA, 20 bp, Artificial Sequence
  Synthetic
ccttctggcccatctggctg

SEQ ID NO: 32920 - DNA, 20 bp, Artificial Sequence
  Synthetic
tctggcccatctggctgagg

SEQ ID NO: 32921 - DNA, 20 bp, Artificial Sequence
  Synthetic
ctggcccatctggctgaggt

SEQ ID NO: 32922 - DNA, 20 bp, Artificial Sequence
  Synthetic
tctacccacctcagccagat

SEQ ID NO: 32923 - DNA, 20 bp, Artificial Sequence
  Synthetic
atctacccacctcagccaga

SEQ ID NO: 32924 - DNA, 20 bp, Artificial Sequence
  Synthetic
tgttgcagagagagaacatt

SEQ ID NO: 32925 - DNA, 20 bp, Artificial Sequence
  Synthetic
gttgcagagagagaacattt

SEQ ID NO: 32926 - DNA, 20 bp, Artificial Sequence
  Synthetic
ttgcagagagagaacatttg

SEQ ID NO: 32927 - DNA, 20 bp, Artificial Sequence
  Synthetic
gcaggtgaaattattaagaa

SEQ ID NO: 32928 - DNA, 20 bp, Artificial Sequence
  Synthetic
caattgttaagtgtagacgc

SEQ ID NO: 32929 - DNA, 20 bp, Artificial Sequence
  Synthetic
ctgcgtctacacttaacaat

SEQ ID NO: 32930 - DNA, 20 bp, Artificial Sequence
  Synthetic
tacacttaacaattggcacc

SEQ ID NO: 32931 - DNA, 20 bp, Artificial Sequence
  Synthetic
gaacaaatctagtaaactcc

SEQ ID NO: 32932 - DNA, 20 bp, Artificial Sequence
  Synthetic
tagatttgttcctaaattta

SEQ ID NO: 32933 - DNA, 20 bp, Artificial Sequence
  Synthetic
ctgatatttaccttaaattt

SEQ ID NO: 32934 - DNA, 20 bp, Artificial Sequence
  Synthetic
ttttctaggtgctaccatat

SEQ ID NO: 32935 - DNA, 20 bp, Artificial Sequence
  Synthetic
tttctaggtgctaccatatt

SEQ ID NO: 32936 - DNA, 20 bp, Artificial Sequence
  Synthetic
ttctaggtgctaccatattg

SEQ ID NO: 32937 - DNA, 20 bp, Artificial Sequence
  Synthetic
tcatgaggatttccccaata

SEQ ID NO: 32938 - DNA, 20 bp, Artificial Sequence
  Synthetic
ctgatgacttttctatcatg

SEQ ID NO: 32939 - DNA, 20 bp, Artificial Sequence
  Synthetic
atgatagaaaagtcatcaga

SEQ ID NO: 32940 - DNA, 20 bp, Artificial Sequence
  Synthetic
gaaaagtcatcagaaggttc

SEQ ID NO: 32941 - DNA, 20 bp, Artificial Sequence
  Synthetic
catcagaaggttctggagtc

SEQ ID NO: 32942 - DNA, 20 bp, Artificial Sequence
  Synthetic
acagaagaccctctacactc

SEQ ID NO: 32943 - DNA, 20 bp, Artificial Sequence
  Synthetic
gggggcatcctgagtgtaga

SEQ ID NO: 32944 - DNA, 20 bp, Artificial Sequence
  Synthetic
agggggcatcctgagtgtag

SEQ ID NO: 32945 - DNA, 20 bp, Artificial Sequence
  Synthetic
tcaggatgcccccttccatg

SEQ ID NO: 32946 - DNA, 20 bp, Artificial Sequence
  Synthetic
ggtaataaccacatggaagg

SEQ ID NO: 32947 - DNA, 20 bp, Artificial Sequence
  Synthetic
tggtaataaccacatggaag

SEQ ID NO: 32948 - DNA, 20 bp, Artificial Sequence
  Synthetic
ctggtaataaccacatggaa

SEQ ID NO: 32949 - DNA, 20 bp, Artificial Sequence
  Synthetic
gctggtaataaccacatgga

SEQ ID NO: 32950 - DNA, 20 bp, Artificial Sequence
  Synthetic
gatagctggtaataaccaca

SEQ ID NO: 32951 - DNA, 20 bp, Artificial Sequence
  Synthetic
ggttattaccagctatcagc

SEQ ID NO: 32952 - DNA, 20 bp, Artificial Sequence
  Synthetic
tattaccagctatcagctgg

SEQ ID NO: 32953 - DNA, 20 bp, Artificial Sequence
  Synthetic
ctgcaccaccagctgatagc

SEQ ID NO: 32954 - DNA, 20 bp, Artificial Sequence
  Synthetic
cagctatcagctggtggtgc

SEQ ID NO: 32955 - DNA, 20 bp, Artificial Sequence
  Synthetic
aggatgtaaagtatttccag

SEQ ID NO: 32956 - DNA, 20 bp, Artificial Sequence
  Synthetic
ggatgtaaagtatttccagc

SEQ ID NO: 32957 - DNA, 20 bp, Artificial Sequence
  Synthetic
agtatttccagcgggtcaag

SEQ ID NO: 32958 - DNA, 20 bp, Artificial Sequence
  Synthetic
tgtattgccacttgacccgc

SEQ ID NO: 32959 - DNA, 20 bp, Artificial Sequence
  Synthetic
gcgggtcaagtggcaataca

SEQ ID NO: 32960 - DNA, 20 bp, Artificial Sequence
  Synthetic
caagtggcaatacatggtac

SEQ ID NO: 32961 - DNA, 20 bp, Artificial Sequence
  Synthetic
gcaatacatggtactggatg

SEQ ID NO: 32962 - DNA, 20 bp, Artificial Sequence
  Synthetic
catggtactggatgaggctc

SEQ ID NO: 32963 - DNA, 20 bp, Artificial Sequence
  Synthetic
aggcgctcaagagtagttcc

SEQ ID NO: 32964 - DNA, 20 bp, Artificial Sequence
  Synthetic
ttttatcaaacagtgttcgt

SEQ ID NO: 32965 - DNA, 20 bp, Artificial Sequence
  Synthetic
tcctcttacagttccagtgt

SEQ ID NO: 32966 - DNA, 20 bp, Artificial Sequence
  Synthetic
tccgacactggaactgtaag

SEQ ID NO: 32967 - DNA, 20 bp, Artificial Sequence
  Synthetic
tacagttccagtgtcggaat

SEQ ID NO: 32968 - DNA, 20 bp, Artificial Sequence
  Synthetic
gcaaaagccgattccgacac

SEQ ID NO: 32969 - DNA, 20 bp, Artificial Sequence
  Synthetic
cggaatcggcttttgctaac

SEQ ID NO: 32970 - DNA, 20 bp, Artificial Sequence
  Synthetic
ggaatcggcttttgctaacc

SEQ ID NO: 32971 - DNA, 20 bp, Artificial Sequence
  Synthetic
ggtgttctgaattggggtcc

SEQ ID NO: 32972 - DNA, 20 bp, Artificial Sequence
  Synthetic
gaccccaattcagaacacca

SEQ ID NO: 32973 - DNA, 20 bp, Artificial Sequence
  Synthetic
tgccatggtgttctgaattg

SEQ ID NO: 32974 - DNA, 20 bp, Artificial Sequence
  Synthetic
ctgccatggtgttctgaatt

SEQ ID NO: 32975 - DNA, 20 bp, Artificial Sequence
  Synthetic
tctgccatggtgttctgaat

SEQ ID NO: 32976 - DNA, 20 bp, Artificial Sequence
  Synthetic
aattcagaacaccatggcag

SEQ ID NO: 32977 - DNA, 20 bp, Artificial Sequence
  Synthetic
cagaacaccatggcagaggt

SEQ ID NO: 32978 - DNA, 20 bp, Artificial Sequence
  Synthetic
actagtgcctacctctgcca

SEQ ID NO: 32979 - DNA, 20 bp, Artificial Sequence
  Synthetic
ttgtctttgtttacagcttt

SEQ ID NO: 32980 - DNA, 20 bp, Artificial Sequence
  Synthetic
tcatgtgaatcaaataatgt

SEQ ID NO: 32981 - DNA, 20 bp, Artificial Sequence
  Synthetic
aacattatttgattcacatg

SEQ ID NO: 32982 - DNA, 20 bp, Artificial Sequence
  Synthetic
cacatgaggaatttaatgaa

SEQ ID NO: 32983 - DNA, 20 bp, Artificial Sequence
  Synthetic
atttaatgaatggttttcca

SEQ ID NO: 32984 - DNA, 20 bp, Artificial Sequence
  Synthetic
ggcatggctctcaatgtcct

SEQ ID NO: 32985 - DNA, 20 bp, Artificial Sequence
  Synthetic
tagcagatttgttttcggca

SEQ ID NO: 32986 - DNA, 20 bp, Artificial Sequence
  Synthetic
atcaatagcagatttgtttt

SEQ ID NO: 32987 - DNA, 20 bp, Artificial Sequence
  Synthetic
ttttgaagccatttatgctg

SEQ ID NO: 32988 - DNA, 20 bp, Artificial Sequence
  Synthetic
ttgattctcctcagcataaa

SEQ ID NO: 32989 - DNA, 20 bp, Artificial Sequence
  Synthetic
gaggagaatcaagaaagatg

SEQ ID NO: 32990 - DNA, 20 bp, Artificial Sequence
  Synthetic
ggaaaatgaattatctgaca

SEQ ID NO: 32991 - DNA, 20 bp, Artificial Sequence
  Synthetic
gcttctgtcggctggtcagt

SEQ ID NO: 32992 - DNA, 20 bp, Artificial Sequence
  Synthetic
atatagcagcttctgtcggc

SEQ ID NO: 32993 - DNA, 20 bp, Artificial Sequence
  Synthetic
cctgatatagcagcttctgt

SEQ ID NO: 32994 - DNA, 20 bp, Artificial Sequence
  Synthetic
ccgacagaagctgctatatc

SEQ ID NO: 32995 - DNA, 20 bp, Artificial Sequence
  Synthetic
aaagaacaaaatttccattg

SEQ ID NO: 32996 - DNA, 20 bp, Artificial Sequence
  Synthetic
agactgcaataaatcctcaa

SEQ ID NO: 32997 - DNA, 20 bp, Artificial Sequence
  Synthetic
ggatttattgcagtcttcta

SEQ ID NO: 32998 - DNA, 20 bp, Artificial Sequence
  Synthetic
gatttattgcagtcttctat

SEQ ID NO: 32999 - DNA, 20 bp, Artificial Sequence
  Synthetic
ggtggtgttctgtgcttgtt

SEQ ID NO: 33000 - DNA, 20 bp, Artificial Sequence
  Synthetic
tggtggtgttctgtgcttgt

SEQ ID NO: 33001 - DNA, 20 bp, Artificial Sequence
  Synthetic
cagattcatgaggctgctgg

SEQ ID NO: 33002 - DNA, 20 bp, Artificial Sequence
  Synthetic
caccagcagcctcatgaatc

SEQ ID NO: 33003 - DNA, 20 bp, Artificial Sequence
  Synthetic
gaccagattcatgaggctgc

SEQ ID NO: 33004 - DNA, 20 bp, Artificial Sequence
  Synthetic
actgcatgaccagattcatg

SEQ ID NO: 33005 - DNA, 20 bp, Artificial Sequence
  Synthetic
tgaatctggtcatgcagttt

SEQ ID NO: 33006 - DNA, 20 bp, Artificial Sequence
  Synthetic
tctggtcatgcagtttagga

SEQ ID NO: 33007 - DNA, 20 bp, Artificial Sequence
  Synthetic
cttttaggtgtgtaatcacc

SEQ ID NO: 33008 - DNA, 20 bp, Artificial Sequence
  Synthetic
cttgccgttcaaataactcc

SEQ ID NO: 33009 - DNA, 20 bp, Artificial Sequence
  Synthetic
tcttgccgttcaaataactc

SEQ ID NO: 33010 - DNA, 20 bp, Artificial Sequence
  Synthetic
gattggcctgcgttgtttgt

SEQ ID NO: 33011 - DNA, 20 bp, Artificial Sequence
  Synthetic
aacttacctacaaacaacgc

SEQ ID NO: 33012 - DNA, 20 bp, Artificial Sequence
  Synthetic
atgttttcttaggcaaatga

SEQ ID NO: 33013 - DNA, 20 bp, Artificial Sequence
  Synthetic
ttttcttaggcaaatgatgg

SEQ ID NO: 33014 - DNA, 20 bp, Artificial Sequence
  Synthetic
aggcaaatgatggtggcatc

SEQ ID NO: 33015 - DNA, 20 bp, Artificial Sequence
  Synthetic
caatcaattagtagaatgtc

SEQ ID NO: 33016 - DNA, 20 bp, Artificial Sequence
  Synthetic
aatctcggtggtagagatta

SEQ ID NO: 33017 - DNA, 20 bp, Artificial Sequence
  Synthetic
ggggtttatgacaatctcgg

SEQ ID NO: 33018 - DNA, 20 bp, Artificial Sequence
  Synthetic
cctggggtttatgacaatct

SEQ ID NO: 33019 - DNA, 20 bp, Artificial Sequence
  Synthetic
ccgagattgtcataaacccc

SEQ ID NO: 33020 - DNA, 20 bp, Artificial Sequence
  Synthetic
taaaccccaggtgacagaca

SEQ ID NO: 33021 - DNA, 20 bp, Artificial Sequence
  Synthetic
gcttccttgtctgtcacctg

SEQ ID NO: 33022 - DNA, 20 bp, Artificial Sequence
  Synthetic
cgcttccttgtctgtcacct

SEQ ID NO: 33023 - DNA, 20 bp, Artificial Sequence
  Synthetic
tcgcttccttgtctgtcacc

SEQ ID NO: 33024 - DNA, 20 bp, Artificial Sequence
  Synthetic
ggaagcgaatgaccctcgcc

SEQ ID NO: 33025 - DNA, 20 bp, Artificial Sequence
  Synthetic
cgaatgaccctcgcctggtg

SEQ ID NO: 33026 - DNA, 20 bp, Artificial Sequence
  Synthetic
cacaataccacaccaggcga

SEQ ID NO: 33027 - DNA, 20 bp, Artificial Sequence
  Synthetic
gcacaataccacaccaggcg

SEQ ID NO: 33028 - DNA, 20 bp, Artificial Sequence
  Synthetic
atcgggcacaataccacacc

SEQ ID NO: 33029 - DNA, 20 bp, Artificial Sequence
  Synthetic
tttcatttgtctggtacatc

SEQ ID NO: 33030 - DNA, 20 bp, Artificial Sequence
  Synthetic
ttttcatttgtctggtacat

SEQ ID NO: 33031 - DNA, 20 bp, Artificial Sequence
  Synthetic
aggctttcgatcttcatgtc

SEQ ID NO: 33032 - DNA, 20 bp, Artificial Sequence
  Synthetic
tgaagatcgaaagccttcag

SEQ ID NO: 33033 - DNA, 20 bp, Artificial Sequence
  Synthetic
cattcaagaagtacctctga

SEQ ID NO: 33034 - DNA, 20 bp, Artificial Sequence
  Synthetic
ctcttcctttccaggtgttt

SEQ ID NO: 33035 - DNA, 20 bp, Artificial Sequence
  Synthetic
tcaggtctgtcctaaacacc

SEQ ID NO: 33036 - DNA, 20 bp, Artificial Sequence
  Synthetic
gcaacttcatggcagtgatc

SEQ ID NO: 33037 - DNA, 20 bp, Artificial Sequence
  Synthetic
gtaggagtcatgcaacttca

SEQ ID NO: 33038 - DNA, 20 bp, Artificial Sequence
  Synthetic
tgactcctaccagctgaatc

SEQ ID NO: 33039 - DNA, 20 bp, Artificial Sequence
  Synthetic
ctcatccggattcagctggt

SEQ ID NO: 33040 - DNA, 20 bp, Artificial Sequence
  Synthetic
agtactcatccggattcagc

SEQ ID NO: 33041 - DNA, 20 bp, Artificial Sequence
  Synthetic
tccggatgagtactatgtgt

SEQ ID NO: 33042 - DNA, 20 bp, Artificial Sequence
  Synthetic
gccaacacatagtactcatc

SEQ ID NO: 33043 - DNA, 20 bp, Artificial Sequence
  Synthetic
actatgtgttggcagatccc

SEQ ID NO: 33044 - DNA, 20 bp, Artificial Sequence
  Synthetic
gttggcagatccctggagac

SEQ ID NO: 33045 - DNA, 20 bp, Artificial Sequence
  Synthetic
cagatccctggagacaggaa

SEQ ID NO: 33046 - DNA, 20 bp, Artificial Sequence
  Synthetic
agatccctggagacaggaat

SEQ ID NO: 33047 - DNA, 20 bp, Artificial Sequence
  Synthetic
ttctcccattcctgtctcca

SEQ ID NO: 33048 - DNA, 20 bp, Artificial Sequence
  Synthetic
tttctcccattcctgtctcc

SEQ ID NO: 33049 - DNA, 20 bp, Artificial Sequence
  Synthetic
tggagacaggaatgggagaa

SEQ ID NO: 33050 - DNA, 20 bp, Artificial Sequence
  Synthetic
ggagacaggaatgggagaaa

SEQ ID NO: 33051 - DNA, 20 bp, Artificial Sequence
  Synthetic
gagacaggaatgggagaaag

SEQ ID NO: 33052 - DNA, 20 bp, Artificial Sequence
  Synthetic
ggaatgggagaaaggggtcc

SEQ ID NO: 33053 - DNA, 20 bp, Artificial Sequence
  Synthetic
ggtccaggtgcctgtgagcc

SEQ ID NO: 33054 - DNA, 20 bp, Artificial Sequence
  Synthetic
gtccaggtgcctgtgagccc

SEQ ID NO: 33055 - DNA, 20 bp, Artificial Sequence
  Synthetic
tccaggtgcctgtgagcccg

SEQ ID NO: 33056 - DNA, 20 bp, Artificial Sequence
  Synthetic
tccccgggctcacaggcacc

SEQ ID NO: 33057 - DNA, 20 bp, Artificial Sequence
  Synthetic
gggatggtccccgggctcac

SEQ ID NO: 33058 - DNA, 20 bp, Artificial Sequence
  Synthetic
caggctgagggatggtcccc

SEQ ID NO: 33059 - DNA, 20 bp, Artificial Sequence
  Synthetic
acaggctgagggatggtccc

SEQ ID NO: 33060 - DNA, 20 bp, Artificial Sequence
  Synthetic
ggggaccatccctcagcctg

SEQ ID NO: 33061 - DNA, 20 bp, Artificial Sequence
  Synthetic
cctggccacaggctgaggga

SEQ ID NO: 33062 - DNA, 20 bp, Artificial Sequence
  Synthetic
ccatccctcagcctgtggcc

SEQ ID NO: 33063 - DNA, 20 bp, Artificial Sequence
  Synthetic
tctacctggccacaggctga

SEQ ID NO: 33064 - DNA, 20 bp, Artificial Sequence
  Synthetic
ctctacctggccacaggctg

SEQ ID NO: 33065 - DNA, 20 bp, Artificial Sequence
  Synthetic
gggcatctctacctggccac

SEQ ID NO: 33066 - DNA, 20 bp, Artificial Sequence
  Synthetic
tttctcttcagacacaaccc

SEQ ID NO: 33067 - DNA, 20 bp, Artificial Sequence
  Synthetic
agaaatccctcatgttcatc

SEQ ID NO: 33068 - DNA, 20 bp, Artificial Sequence
  Synthetic
cttgggcctgatgaacatga

SEQ ID NO: 33069 - DNA, 20 bp, Artificial Sequence
  Synthetic
tcttgggcctgatgaacatg

SEQ ID NO: 33070 - DNA, 20 bp, Artificial Sequence
  Synthetic
gatgacacgatgtacttctt

SEQ ID NO: 33071 - DNA, 20 bp, Artificial Sequence
  Synthetic
tgatgacacgatgtacttct

SEQ ID NO: 33072 - DNA, 20 bp, Artificial Sequence
  Synthetic
aagaagtacatcgtgtcatc

SEQ ID NO: 33073 - DNA, 20 bp, Artificial Sequence
  Synthetic
aggctctgagcctcccgagt

SEQ ID NO: 33074 - DNA, 20 bp, Artificial Sequence
  Synthetic
ggctctgagcctcccgagtt

SEQ ID NO: 33075 - DNA, 20 bp, Artificial Sequence
  Synthetic
gcctcccgagttgggctatg

SEQ ID NO: 33076 - DNA, 20 bp, Artificial Sequence
  Synthetic
tccacatagcccaactcggg

SEQ ID NO: 33077 - DNA, 20 bp, Artificial Sequence
  Synthetic
atgtccacatagcccaactc

SEQ ID NO: 33078 - DNA, 20 bp, Artificial Sequence
  Synthetic
gatgtccacatagcccaact

SEQ ID NO: 33079 - DNA, 20 bp, Artificial Sequence
  Synthetic
agttgggctatgtggacatc

SEQ ID NO: 33080 - DNA, 20 bp, Artificial Sequence
  Synthetic
ctatgtggacatccggacgc

SEQ ID NO: 33081 - DNA, 20 bp, Artificial Sequence
  Synthetic
acacgctgtcagccagcgtc

SEQ ID NO: 33082 - DNA, 20 bp, Artificial Sequence
  Synthetic
tcgctatgacctcaatgaca

SEQ ID NO: 33083 - DNA, 20 bp, Artificial Sequence
  Synthetic
atgcagcatccatgtcattg

SEQ ID NO: 33084 - DNA, 20 bp, Artificial Sequence
  Synthetic
tcaatgacatggatgctgca

SEQ ID NO: 33085 - DNA, 20 bp, Artificial Sequence
  Synthetic
tgacatggatgctgcatggc

SEQ ID NO: 33086 - DNA, 20 bp, Artificial Sequence
  Synthetic
actgaccaatgaagaattta

SEQ ID NO: 33087 - DNA, 20 bp, Artificial Sequence
  Synthetic
catctccttaaattcttcat

SEQ ID NO: 33088 - DNA, 20 bp, Artificial Sequence
  Synthetic
caatgaagaatttaaggaga

SEQ ID NO: 33089 - DNA, 20 bp, Artificial Sequence
  Synthetic
aatgaagaatttaaggagat

SEQ ID NO: 33090 - DNA, 20 bp, Artificial Sequence
  Synthetic
atggtgtattcatctagttc

SEQ ID NO: 33091 - DNA, 20 bp, Artificial Sequence
  Synthetic
tgaactagatgaatacacca

SEQ ID NO: 33092 - DNA, 20 bp, Artificial Sequence
  Synthetic
tagatgaatacaccatggag

SEQ ID NO: 33093 - DNA, 20 bp, Artificial Sequence
  Synthetic
agatgaatacaccatggaga

SEQ ID NO: 33094 - DNA, 20 bp, Artificial Sequence
  Synthetic
caccatggagagggtcctag

SEQ ID NO: 33095 - DNA, 20 bp, Artificial Sequence
  Synthetic
ttcctctaggaccctctcca

SEQ ID NO: 33096 - DNA, 20 bp, Artificial Sequence
  Synthetic
atcgctgctcaaattcctct

SEQ ID NO: 33097 - DNA, 20 bp, Artificial Sequence
  Synthetic
ggcttcttttcgttctgtcg

SEQ ID NO: 33098 - DNA, 20 bp, Artificial Sequence
  Synthetic
gggcttcttttcgttctgtc

SEQ ID NO: 33099 - DNA, 20 bp, Artificial Sequence
  Synthetic
agggcttcttttcgttctgt

SEQ ID NO: 33100 - DNA, 20 bp, Artificial Sequence
  Synthetic
gaacgaaaagaagccctccg

SEQ ID NO: 33101 - DNA, 20 bp, Artificial Sequence
  Synthetic
cgaaaagaagccctccgagg

SEQ ID NO: 33102 - DNA, 20 bp, Artificial Sequence
  Synthetic
gaaaagaagccctccgaggt

SEQ ID NO: 33103 - DNA, 20 bp, Artificial Sequence
  Synthetic
tcatcactacccacctcgga

SEQ ID NO: 33104 - DNA, 20 bp, Artificial Sequence
  Synthetic
ctcatcactacccacctcgg

SEQ ID NO: 33105 - DNA, 20 bp, Artificial Sequence
  Synthetic
cttgcccctcacaggttttc

SEQ ID NO: 33106 - DNA, 20 bp, Artificial Sequence
  Synthetic
tggctgtgatcaagtctgtc

SEQ ID NO: 33107 - DNA, 20 bp, Artificial Sequence
  Synthetic
gatcacagccatgaagatcc

SEQ ID NO: 33108 - DNA, 20 bp, Artificial Sequence
  Synthetic
gtatgagtccgggatcttca

SEQ ID NO: 33109 - DNA, 20 bp, Artificial Sequence
  Synthetic
ggctgagctggtatgagtcc

SEQ ID NO: 33110 - DNA, 20 bp, Artificial Sequence
  Synthetic
gggctgagctggtatgagtc

SEQ ID NO: 33111 - DNA, 20 bp, Artificial Sequence
  Synthetic
ggactcataccagctcagcc

SEQ ID NO: 33112 - DNA, 20 bp, Artificial Sequence
  Synthetic
agtagtcatccgggctgagc

SEQ ID NO: 33113 - DNA, 20 bp, Artificial Sequence
  Synthetic
ccaggatgtagtagtcatcc

SEQ ID NO: 33114 - DNA, 20 bp, Artificial Sequence
  Synthetic
cccggatgactactacatcc

SEQ ID NO: 33115 - DNA, 20 bp, Artificial Sequence
  Synthetic
gccaggatgtagtagtcatc

SEQ ID NO: 33116 - DNA, 20 bp, Artificial Sequence
  Synthetic
actacatcctggcagaccca

SEQ ID NO: 33117 - DNA, 20 bp, Artificial Sequence
  Synthetic
cctgtcgccatgggtctgcc

SEQ ID NO: 33118 - DNA, 20 bp, Artificial Sequence
  Synthetic
cctggcagacccatggcgac

SEQ ID NO: 33119 - DNA, 20 bp, Artificial Sequence
  Synthetic
cagacccatggcgacaggaa

SEQ ID NO: 33120 - DNA, 20 bp, Artificial Sequence
  Synthetic
agacccatggcgacaggaat

SEQ ID NO: 33121 - DNA, 20 bp, Artificial Sequence
  Synthetic
tctcccattcctgtcgccat

SEQ ID NO: 33122 - DNA, 20 bp, Artificial Sequence
  Synthetic
ttctcccattcctgtcgcca

SEQ ID NO: 33123 - DNA, 20 bp, Artificial Sequence
  Synthetic
tggcgacaggaatgggagaa

SEQ ID NO: 33124 - DNA, 20 bp, Artificial Sequence
  Synthetic
ggaatgggagaaaggtgtgc

SEQ ID NO: 33125 - DNA, 20 bp, Artificial Sequence
  Synthetic
aaaggtgtgcaggtgcctgc

SEQ ID NO: 33126 - DNA, 20 bp, Artificial Sequence
  Synthetic
aaggtgtgcaggtgcctgcc

SEQ ID NO: 33127 - DNA, 20 bp, Artificial Sequence
  Synthetic
aggtgtgcaggtgcctgccg

SEQ ID NO: 33128 - DNA, 20 bp, Artificial Sequence
  Synthetic
gcaggtgcctgccggggcag

SEQ ID NO: 33129 - DNA, 20 bp, Artificial Sequence
  Synthetic
gggatggcctctgccccggc

SEQ ID NO: 33130 - DNA, 20 bp, Artificial Sequence
  Synthetic
ctctgggatggcctctgccc

SEQ ID NO: 33131 - DNA, 20 bp, Artificial Sequence
  Synthetic
agaggccatcccagagcccg

SEQ ID NO: 33132 - DNA, 20 bp, Artificial Sequence
  Synthetic
cctcaccacgggctctggga

SEQ ID NO: 33133 - DNA, 20 bp, Artificial Sequence
  Synthetic
ccatcccagagcccgtggtg

SEQ ID NO: 33134 - DNA, 20 bp, Artificial Sequence
  Synthetic
ctcacctcaccacgggctct

SEQ ID NO: 33135 - DNA, 20 bp, Artificial Sequence
  Synthetic
gctcacctcaccacgggctc

SEQ ID NO: 33136 - DNA, 20 bp, Artificial Sequence
  Synthetic
tgcctggctcacctcaccac

SEQ ID NO: 33137 - DNA, 20 bp, Artificial Sequence
  Synthetic
ctgcctggctcacctcacca

SEQ ID NO: 33138 - DNA, 20 bp, Artificial Sequence
  Synthetic
ttctaggatcctcccaccac

SEQ ID NO: 33139 - DNA, 20 bp, Artificial Sequence
  Synthetic
aggatcctcccaccactgga

SEQ ID NO: 33140 - DNA, 20 bp, Artificial Sequence
  Synthetic
gggggccttccagtggtggg

SEQ ID NO: 33141 - DNA, 20 bp, Artificial Sequence
  Synthetic
caggggggccttccagtggt

SEQ ID NO: 33142 - DNA, 20 bp, Artificial Sequence
  Synthetic
gcaggggggccttccagtgg

SEQ ID NO: 33143 - DNA, 20 bp, Artificial Sequence
  Synthetic
tgggcaggggggccttccag

SEQ ID NO: 33144 - DNA, 20 bp, Artificial Sequence
  Synthetic
actggaaggcccccctgccc

SEQ ID NO: 33145 - DNA, 20 bp, Artificial Sequence
  Synthetic
tcggggatgcctgggcaggg

SEQ ID NO: 33146 - DNA, 20 bp, Artificial Sequence
  Synthetic
ctcggggatgcctgggcagg

SEQ ID NO: 33147 - DNA, 20 bp, Artificial Sequence
  Synthetic
gctcggggatgcctgggcag

SEQ ID NO: 33148 - DNA, 20 bp, Artificial Sequence
  Synthetic
tgctcggggatgcctgggca

SEQ ID NO: 33149 - DNA, 20 bp, Artificial Sequence
  Synthetic
ctgctcggggatgcctgggc

SEQ ID NO: 33150 - DNA, 20 bp, Artificial Sequence
  Synthetic
ggtgctgctcggggatgcct

SEQ ID NO: 33151 - DNA, 20 bp, Artificial Sequence
  Synthetic
tggtgctgctcggggatgcc

SEQ ID NO: 33152 - DNA, 20 bp, Artificial Sequence
  Synthetic
tccccgagcagcaccatgct

SEQ ID NO: 33153 - DNA, 20 bp, Artificial Sequence
  Synthetic
accaagcatggtgctgctcg

SEQ ID NO: 33154 - DNA, 20 bp, Artificial Sequence
  Synthetic
caccaagcatggtgctgctc

SEQ ID NO: 33155 - DNA, 20 bp, Artificial Sequence
  Synthetic
tcaccaagcatggtgctgct

SEQ ID NO: 33156 - DNA, 20 bp, Artificial Sequence
  Synthetic
gagcagcaccatgcttggtg

SEQ ID NO: 33157 - DNA, 20 bp, Artificial Sequence
  Synthetic
agcagcaccatgcttggtga

SEQ ID NO: 33158 - DNA, 20 bp, Artificial Sequence
  Synthetic
ctgggagccctcaccaagca

SEQ ID NO: 33159 - DNA, 20 bp, Artificial Sequence
  Synthetic
gtgagggctcccagcctgat

SEQ ID NO: 33160 - DNA, 20 bp, Artificial Sequence
  Synthetic
ggctcccagcctgattggcc

SEQ ID NO: 33161 - DNA, 20 bp, Artificial Sequence
  Synthetic
gctcccagcctgattggcca

SEQ ID NO: 33162 - DNA, 20 bp, Artificial Sequence
  Synthetic
ctcccagcctgattggccag

SEQ ID NO: 33163 - DNA, 20 bp, Artificial Sequence
  Synthetic
tcccagcctgattggccagg

SEQ ID NO: 33164 - DNA, 20 bp, Artificial Sequence
  Synthetic
gccccctggccaatcaggct

SEQ ID NO: 33165 - DNA, 20 bp, Artificial Sequence
  Synthetic
tgccccctggccaatcaggc

SEQ ID NO: 33166 - DNA, 20 bp, Artificial Sequence
  Synthetic
cggctgccccctggccaatc

SEQ ID NO: 33167 - DNA, 20 bp, Artificial Sequence
  Synthetic
aagtcatagcggctgccccc

SEQ ID NO: 33168 - DNA, 20 bp, Artificial Sequence
  Synthetic
agggggcagccgctatgact

SEQ ID NO: 33169 - DNA, 20 bp, Artificial Sequence
  Synthetic
caatctcgtccaagtcatag

SEQ ID NO: 33170 - DNA, 20 bp, Artificial Sequence
  Synthetic
tggacgagattgatgcctac

SEQ ID NO: 33171 - DNA, 20 bp, Artificial Sequence
  Synthetic
cgagattgatgcctactggc

SEQ ID NO: 33172 - DNA, 20 bp, Artificial Sequence
  Synthetic
gttgatgagctccagccagt

SEQ ID NO: 33173 - DNA, 20 bp, Artificial Sequence
  Synthetic
ctggctggagctcatcaact

SEQ ID NO: 33174 - DNA, 20 bp, Artificial Sequence
  Synthetic
gctcatcaactcggagctta

SEQ ID NO: 33175 - DNA, 20 bp, Artificial Sequence
  Synthetic
caactcggagcttaaggaga

SEQ ID NO: 33176 - DNA, 20 bp, Artificial Sequence
  Synthetic
aactcggagcttaaggagat

SEQ ID NO: 33177 - DNA, 20 bp, Artificial Sequence
  Synthetic
cggagcttaaggagatgggt

SEQ ID NO: 33178 - DNA, 20 bp, Artificial Sequence
  Synthetic
tgtcctcctcacagagaggc

SEQ ID NO: 33179 - DNA, 20 bp, Artificial Sequence
  Synthetic
cctcacagagaggccggagc

SEQ ID NO: 33180 - DNA, 20 bp, Artificial Sequence
  Synthetic
aatgtcagctcgtccagctc

SEQ ID NO: 33181 - DNA, 20 bp, Artificial Sequence
  Synthetic
gctgacattagagcgtgtgc

SEQ ID NO: 33182 - DNA, 20 bp, Artificial Sequence
  Synthetic
gacattagagcgtgtgctgg

SEQ ID NO: 33183 - DNA, 20 bp, Artificial Sequence
  Synthetic
agagcgtgtgctggaggagc

SEQ ID NO: 33184 - DNA, 20 bp, Artificial Sequence
  Synthetic
tgaacacaagaaacctgctg

SEQ ID NO: 33185 - DNA, 20 bp, Artificial Sequence
  Synthetic
gaatacgatctcacctcagc

SEQ ID NO: 33186 - DNA, 20 bp, Artificial Sequence
  Synthetic
caatatctttccaggtattc

SEQ ID NO: 33187 - DNA, 20 bp, Artificial Sequence
  Synthetic
atctttccaggtattccgga

SEQ ID NO: 33188 - DNA, 20 bp, Artificial Sequence
  Synthetic
tgaggtccttccggaatacc

SEQ ID NO: 33189 - DNA, 20 bp, Artificial Sequence
  Synthetic
tggcactgatgaggtccttc

SEQ ID NO: 33190 - DNA, 20 bp, Artificial Sequence
  Synthetic
gaagtttcatggcactgatg

SEQ ID NO: 33191 - DNA, 20 bp, Artificial Sequence
  Synthetic
gtgagaatctggaagtttca

SEQ ID NO: 33192 - DNA, 20 bp, Artificial Sequence
  Synthetic
ggattaatgtggtgagaatc

SEQ ID NO: 33193 - DNA, 20 bp, Artificial Sequence
  Synthetic
aatagctatcaggattaatg

SEQ ID NO: 33194 - DNA, 20 bp, Artificial Sequence
  Synthetic
gcaaagaggtaatagctatc

SEQ ID NO: 33195 - DNA, 20 bp, Artificial Sequence
  Synthetic
attacctctttgctgataca

SEQ ID NO: 33196 - DNA, 20 bp, Artificial Sequence
  Synthetic
ccttccatgtatcagcaaag

SEQ ID NO: 33197 - DNA, 20 bp, Artificial Sequence
  Synthetic
cctctttgctgatacatgga

SEQ ID NO: 33198 - DNA, 20 bp, Artificial Sequence
  Synthetic
ctgatacatggaaggaagaa

SEQ ID NO: 33199 - DNA, 20 bp, Artificial Sequence
  Synthetic
tgatacatggaaggaagaat

SEQ ID NO: 33200 - DNA, 20 bp, Artificial Sequence
  Synthetic
atggaaggaagaatgggaaa

SEQ ID NO: 33201 - DNA, 20 bp, Artificial Sequence
  Synthetic
tggaaggaagaatgggaaaa

SEQ ID NO: 33202 - DNA, 20 bp, Artificial Sequence
  Synthetic
agaatgggaaaagggagtcc

SEQ ID NO: 33203 - DNA, 20 bp, Artificial Sequence
  Synthetic
tgtctggactggctggtacc

SEQ ID NO: 33204 - DNA, 20 bp, Artificial Sequence
  Synthetic
ggaacggtgtctggactggc

SEQ ID NO: 33205 - DNA, 20 bp, Artificial Sequence
  Synthetic
ctgtggaacggtgtctggac

SEQ ID NO: 33206 - DNA, 20 bp, Artificial Sequence
  Synthetic
gaaggctgtggaacggtgtc

SEQ ID NO: 33207 - DNA, 20 bp, Artificial Sequence
  Synthetic
cctgagagaaggctgtggaa

SEQ ID NO: 33208 - DNA, 20 bp, Artificial Sequence
  Synthetic
ccgttccacagccttctctc

SEQ ID NO: 33209 - DNA, 20 bp, Artificial Sequence
  Synthetic
aaatacctgagagaaggctg

SEQ ID NO: 33210 - DNA, 20 bp, Artificial Sequence
  Synthetic
gcatgcaaatacctgagaga

SEQ ID NO: 33211 - DNA, 20 bp, Artificial Sequence
  Synthetic
ttctaggattatagctgaga

SEQ ID NO: 33212 - DNA, 20 bp, Artificial Sequence
  Synthetic
gattatagctgagaaggtaa

SEQ ID NO: 33213 - DNA, 20 bp, Artificial Sequence
  Synthetic
acgttctgtttatccgaccc

SEQ ID NO: 33214 - DNA, 20 bp, Artificial Sequence
  Synthetic
agtgaatatacttccggggt

SEQ ID NO: 33215 - DNA, 20 bp, Artificial Sequence
  Synthetic
gagcagtgaatatacttccg

SEQ ID NO: 33216 - DNA, 20 bp, Artificial Sequence
  Synthetic
ggagcagtgaatatacttcc

SEQ ID NO: 33217 - DNA, 20 bp, Artificial Sequence
  Synthetic
tggagcagtgaatatacttc

SEQ ID NO: 33218 - DNA, 20 bp, Artificial Sequence
  Synthetic
aggctctgtggtgtctgggc

SEQ ID NO: 33219 - DNA, 20 bp, Artificial Sequence
  Synthetic
agcccagacaccacagagcc

SEQ ID NO: 33220 - DNA, 20 bp, Artificial Sequence
  Synthetic
agccaggctctgtggtgtct

SEQ ID NO: 33221 - DNA, 20 bp, Artificial Sequence
  Synthetic
tagccaggctctgtggtgtc

SEQ ID NO: 33222 - DNA, 20 bp, Artificial Sequence
  Synthetic
gttgatgtagccaggctctg

SEQ ID NO: 33223 - DNA, 20 bp, Artificial Sequence
  Synthetic
gcctggctacatcaacatca

SEQ ID NO: 33224 - DNA, 20 bp, Artificial Sequence
  Synthetic
tccatgatgttgatgtagcc

SEQ ID NO: 33225 - DNA, 20 bp, Artificial Sequence
  Synthetic
ctacatcaacatcatggagt

SEQ ID NO: 33226 - DNA, 20 bp, Artificial Sequence
  Synthetic
ccatgtcatctaggtcatag

SEQ ID NO: 33227 - DNA, 20 bp, Artificial Sequence
  Synthetic
ccgctatgacctagatgaca

SEQ ID NO: 33228 - DNA, 20 bp, Artificial Sequence
  Synthetic
agaagatgtccatgtcatct

SEQ ID NO: 33229 - DNA, 20 bp, Artificial Sequence
  Synthetic
tagatgacatggacatcttc

SEQ ID NO: 33230 - DNA, 20 bp, Artificial Sequence
  Synthetic
catggacatcttctggcttc

SEQ ID NO: 33231 - DNA, 20 bp, Artificial Sequence
  Synthetic
caatgaagaccttgcagaaa

SEQ ID NO: 33232 - DNA, 20 bp, Artificial Sequence
  Synthetic
aatgaagaccttgcagaaat

SEQ ID NO: 33233 - DNA, 20 bp, Artificial Sequence
  Synthetic
agaacttacccatttctgca

SEQ ID NO: 33234 - DNA, 20 bp, Artificial Sequence
  Synthetic
ttgtatttctgtgcaggttg

SEQ ID NO: 33235 - DNA, 20 bp, Artificial Sequence
  Synthetic
tgtatttctgtgcaggttgt

SEQ ID NO: 33236 - DNA, 20 bp, Artificial Sequence
  Synthetic
gccagttgatgagaatctta

SEQ ID NO: 33237 - DNA, 20 bp, Artificial Sequence
  Synthetic
tccataagattctcatcaac

SEQ ID NO: 33238 - DNA, 20 bp, Artificial Sequence
  Synthetic
ggaaaagacagtagaagtcc

SEQ ID NO: 33239 - DNA, 20 bp, Artificial Sequence
  Synthetic
tttcatggcaatggcgttcc

SEQ ID NO: 33240 - DNA, 20 bp, Artificial Sequence
  Synthetic
actattccctggctaaatat

SEQ ID NO: 33241 - DNA, 20 bp, Artificial Sequence
  Synthetic
tccctggctaaatattggca

SEQ ID NO: 33242 - DNA, 20 bp, Artificial Sequence
  Synthetic
accatgccaatatttagcca

SEQ ID NO: 33243 - DNA, 20 bp, Artificial Sequence
  Synthetic
gaccatgccaatatttagcc

SEQ ID NO: 33244 - DNA, 20 bp, Artificial Sequence
  Synthetic
tggtcttttctacctcatgc

SEQ ID NO: 33245 - DNA, 20 bp, Artificial Sequence
  Synthetic
ttggtctcgagaccagcatg

SEQ ID NO: 33246 - DNA, 20 bp, Artificial Sequence
  Synthetic
caatgtatggaaggtgattt

SEQ ID NO: 33247 - DNA, 20 bp, Artificial Sequence
  Synthetic
gtaagtagtcaatgtatgga

SEQ ID NO: 33248 - DNA, 20 bp, Artificial Sequence
  Synthetic
gtgtgtaagtagtcaatgta

SEQ ID NO: 33249 - DNA, 20 bp, Artificial Sequence
  Synthetic
tacattgactacttacacac

SEQ ID NO: 33250 - DNA, 20 bp, Artificial Sequence
  Synthetic
acactggtgctgactgcatt

SEQ ID NO: 33251 - DNA, 20 bp, Artificial Sequence
  Synthetic
ctcagcaggaatgcaatacc

SEQ ID NO: 33252 - DNA, 20 bp, Artificial Sequence
  Synthetic
caggtattgcattcctgctg

SEQ ID NO: 33253 - DNA, 20 bp, Artificial Sequence
  Synthetic
gtattgcattcctgctgagg

SEQ ID NO: 33254 - DNA, 20 bp, Artificial Sequence
  Synthetic
agcttgttctcctcctcagc

SEQ ID NO: 33255 - DNA, 20 bp, Artificial Sequence
  Synthetic
tgctgaggaggagaacaagc

SEQ ID NO: 33256 - DNA, 20 bp, Artificial Sequence
  Synthetic
ggagaacaagctggaagatg

SEQ ID NO: 33257 - DNA, 20 bp, Artificial Sequence
  Synthetic
cattggcttgcagcagggtg

SEQ ID NO: 33258 - DNA, 20 bp, Artificial Sequence
  Synthetic
cacaccctgctgcaagccaa

SEQ ID NO: 33259 - DNA, 20 bp, Artificial Sequence
  Synthetic
ggtgccattggcttgcagca

SEQ ID NO: 33260 - DNA, 20 bp, Artificial Sequence
  Synthetic
gggtgccattggcttgcagc

SEQ ID NO: 33261 - DNA, 20 bp, Artificial Sequence
  Synthetic
ctgcaagccaatggcacccc

SEQ ID NO: 33262 - DNA, 20 bp, Artificial Sequence
  Synthetic
tgcaagccaatggcacccca

SEQ ID NO: 33263 - DNA, 20 bp, Artificial Sequence
  Synthetic
ctgcagccctggggtgccat

SEQ ID NO: 33264 - DNA, 20 bp, Artificial Sequence
  Synthetic
caccccagggctgcagatgc

SEQ ID NO: 33265 - DNA, 20 bp, Artificial Sequence
  Synthetic
ttccagcatctgcagccctg

SEQ ID NO: 33266 - DNA, 20 bp, Artificial Sequence
  Synthetic
tttccagcatctgcagccct

SEQ ID NO: 33267 - DNA, 20 bp, Artificial Sequence
  Synthetic
ctttccagcatctgcagccc

SEQ ID NO: 33268 - DNA, 20 bp, Artificial Sequence
  Synthetic
gatgctggaaagcaacgtca

SEQ ID NO: 33269 - DNA, 20 bp, Artificial Sequence
  Synthetic
cctgtctccccagatctccc

SEQ ID NO: 33270 - DNA, 20 bp, Artificial Sequence
  Synthetic
gtctccccagatctccccgg

SEQ ID NO: 33271 - DNA, 20 bp, Artificial Sequence
  Synthetic
acagcacctccggggagatc

SEQ ID NO: 33272 - DNA, 20 bp, Artificial Sequence
  Synthetic
ctctttgcacagcacctccg

SEQ ID NO: 33273 - DNA, 20 bp, Artificial Sequence
  Synthetic
cctctttgcacagcacctcc

SEQ ID NO: 33274 - DNA, 20 bp, Artificial Sequence
  Synthetic
cccggaggtgctgtgcaaag

SEQ ID NO: 33275 - DNA, 20 bp, Artificial Sequence
  Synthetic
ccctctttgcacagcacctc

SEQ ID NO: 33276 - DNA, 20 bp, Artificial Sequence
  Synthetic
ccggaggtgctgtgcaaaga

SEQ ID NO: 33277 - DNA, 20 bp, Artificial Sequence
  Synthetic
cggaggtgctgtgcaaagag

SEQ ID NO: 33278 - DNA, 20 bp, Artificial Sequence
  Synthetic
gctgtgcaaagaggggatca

SEQ ID NO: 33279 - DNA, 20 bp, Artificial Sequence
  Synthetic
aagaggggatcaaggtgcac

SEQ ID NO: 33280 - DNA, 20 bp, Artificial Sequence
  Synthetic
cacaggaccgtgcagcagag

SEQ ID NO: 33281 - DNA, 20 bp, Artificial Sequence
  Synthetic
aaactggccactctgctgca

SEQ ID NO: 33282 - DNA, 20 bp, Artificial Sequence
  Synthetic
ccgggaagcagacgacaaac

SEQ ID NO: 33283 - DNA, 20 bp, Artificial Sequence
  Synthetic
ccagtttgtcgtctgcttcc

SEQ ID NO: 33284 - DNA, 20 bp, Artificial Sequence
  Synthetic
cagtttgtcgtctgcttccc

SEQ ID NO: 33285 - DNA, 20 bp, Artificial Sequence
  Synthetic
ctttggacacaaaggatccc

SEQ ID NO: 33286 - DNA, 20 bp, Artificial Sequence
  Synthetic
actttggacacaaaggatcc

SEQ ID NO: 33287 - DNA, 20 bp, Artificial Sequence
  Synthetic
acagcacactttggacacaa

SEQ ID NO: 33288 - DNA, 20 bp, Artificial Sequence
  Synthetic
tttgtgtccaaagtgtgctg

SEQ ID NO: 33289 - DNA, 20 bp, Artificial Sequence
  Synthetic
ttgtgtccaaagtgtgctgt

SEQ ID NO: 33290 - DNA, 20 bp, Artificial Sequence
  Synthetic
gctgtacccacagcacactt

SEQ ID NO: 33291 - DNA, 20 bp, Artificial Sequence
  Synthetic
ctgggtggtagcaaagtgca

SEQ ID NO: 33292 - DNA, 20 bp, Artificial Sequence
  Synthetic
tccacaagctgggccggcgc

SEQ ID NO: 33293 - DNA, 20 bp, Artificial Sequence
  Synthetic
ccacaagctgggccggcgct

SEQ ID NO: 33294 - DNA, 20 bp, Artificial Sequence
  Synthetic
cacaagctgggccggcgctg

SEQ ID NO: 33295 - DNA, 20 bp, Artificial Sequence
  Synthetic
gcacgttggggccccagcgc

SEQ ID NO: 33296 - DNA, 20 bp, Artificial Sequence
  Synthetic
gctggggccccaacgtgcag

SEQ ID NO: 33297 - DNA, 20 bp, Artificial Sequence
  Synthetic
gggccccaacgtgcagcggc

SEQ ID NO: 33298 - DNA, 20 bp, Artificial Sequence
  Synthetic
aggccagccgctgcacgttg

SEQ ID NO: 33299 - DNA, 20 bp, Artificial Sequence
  Synthetic
caggccagccgctgcacgtt

SEQ ID NO: 33300 - DNA, 20 bp, Artificial Sequence
  Synthetic
gcaggccagccgctgcacgt

SEQ ID NO: 33301 - DNA, 20 bp, Artificial Sequence
  Synthetic
tttgaggtgcttcttgatgc

SEQ ID NO: 33302 - DNA, 20 bp, Artificial Sequence
  Synthetic
caagaagcacctcaaatctc

SEQ ID NO: 33303 - DNA, 20 bp, Artificial Sequence
  Synthetic
aagaagcacctcaaatctca

SEQ ID NO: 33304 - DNA, 20 bp, Artificial Sequence
  Synthetic
tggtgatgccctgagatttg

SEQ ID NO: 33305 - DNA, 20 bp, Artificial Sequence
  Synthetic
caaatctcagggcatcacca

SEQ ID NO: 33306 - DNA, 20 bp, Artificial Sequence
  Synthetic
tatgagcgggagctcgtcca

SEQ ID NO: 33307 - DNA, 20 bp, Artificial Sequence
  Synthetic
atggacgagctcccgctcat

SEQ ID NO: 33308 - DNA, 20 bp, Artificial Sequence
  Synthetic
acgagctcccgctcataggt

SEQ ID NO: 33309 - DNA, 20 bp, Artificial Sequence
  Synthetic
gcccagacctacctatgagc

SEQ ID NO: 33310 - DNA, 20 bp, Artificial Sequence
  Synthetic
cgcccagacctacctatgag

SEQ ID NO: 33311 - DNA, 20 bp, Artificial Sequence
  Synthetic
aggtcgagctcacagccccc

SEQ ID NO: 33312 - DNA, 20 bp, Artificial Sequence
  Synthetic
agggggctgtgagctcgacc

SEQ ID NO: 33313 - DNA, 20 bp, Artificial Sequence
  Synthetic
tcgacctggcctgctttttc

SEQ ID NO: 33314 - DNA, 20 bp, Artificial Sequence
  Synthetic
tcagccggaaaaagcaggcc

SEQ ID NO: 33315 - DNA, 20 bp, Artificial Sequence
  Synthetic
attaatcagccggaaaaagc

SEQ ID NO: 33316 - DNA, 20 bp, Artificial Sequence
  Synthetic
tttccggctgattaatgaga

SEQ ID NO: 33317 - DNA, 20 bp, Artificial Sequence
  Synthetic
ttccggctgattaatgagat

SEQ ID NO: 33318 - DNA, 20 bp, Artificial Sequence
  Synthetic
cgcccatctcattaatcagc

SEQ ID NO: 33319 - DNA, 20 bp, Artificial Sequence
  Synthetic
cggctgattaatgagatggg

SEQ ID NO: 33320 - DNA, 20 bp, Artificial Sequence
  Synthetic
aagtgactgacctcaaaaaa

SEQ ID NO: 33321 - DNA, 20 bp, Artificial Sequence
  Synthetic
ctagtttgttccattttttg

SEQ ID NO: 33322 - DNA, 20 bp, Artificial Sequence
  Synthetic
gcgcatccccagaactgccc

SEQ ID NO: 33323 - DNA, 20 bp, Artificial Sequence
  Synthetic
tccccagaactgcccaggac

SEQ ID NO: 33324 - DNA, 20 bp, Artificial Sequence
  Synthetic
gccggtcctgggcagttctg

SEQ ID NO: 33325 - DNA, 20 bp, Artificial Sequence
  Synthetic
agccggtcctgggcagttct

SEQ ID NO: 33326 - DNA, 20 bp, Artificial Sequence
  Synthetic
cagccggtcctgggcagttc

SEQ ID NO: 33327 - DNA, 20 bp, Artificial Sequence
  Synthetic
cagaactgcccaggaccggc

SEQ ID NO: 33328 - DNA, 20 bp, Artificial Sequence
  Synthetic
cagcttggccagccggtcct

SEQ ID NO: 33329 - DNA, 20 bp, Artificial Sequence
  Synthetic
gcagcttggccagccggtcc

SEQ ID NO: 33330 - DNA, 20 bp, Artificial Sequence
  Synthetic
ggaccggctggccaagctgc

SEQ ID NO: 33331 - DNA, 20 bp, Artificial Sequence
  Synthetic
cctcctgcagcttggccagc

SEQ ID NO: 33332 - DNA, 20 bp, Artificial Sequence
  Synthetic
ccggctggccaagctgcagg

SEQ ID NO: 33333 - DNA, 20 bp, Artificial Sequence
  Synthetic
gcagtaggcctcctgcagct

SEQ ID NO: 33334 - DNA, 20 bp, Artificial Sequence
  Synthetic
ggagagtaggtactggcagt

SEQ ID NO: 33335 - DNA, 20 bp, Artificial Sequence
  Synthetic
agtcgtaggagagtaggtac

SEQ ID NO: 33336 - DNA, 20 bp, Artificial Sequence
  Synthetic
acagggagtcgtaggagagt

SEQ ID NO: 33337 - DNA, 20 bp, Artificial Sequence
  Synthetic
ctctggggacagggagtcgt

SEQ ID NO: 33338 - DNA, 20 bp, Artificial Sequence
  Synthetic
tggacgagatccccgtcctc

SEQ ID NO: 33339 - DNA, 20 bp, Artificial Sequence
  Synthetic
tggcggagggcctgaggacg

SEQ ID NO: 33340 - DNA, 20 bp, Artificial Sequence
  Synthetic
ttggcggagggcctgaggac

SEQ ID NO: 33341 - DNA, 20 bp, Artificial Sequence
  Synthetic
cttggcggagggcctgagga

SEQ ID NO: 33342 - DNA, 20 bp, Artificial Sequence
  Synthetic
cgtcctcaggccctccgcca

SEQ ID NO: 33343 - DNA, 20 bp, Artificial Sequence
  Synthetic
actccttggcggagggcctg

SEQ ID NO: 33344 - DNA, 20 bp, Artificial Sequence
  Synthetic
tcgtggaactccttggcgga

SEQ ID NO: 33345 - DNA, 20 bp, Artificial Sequence
  Synthetic
atcgtggaactccttggcgg

SEQ ID NO: 33346 - DNA, 20 bp, Artificial Sequence
  Synthetic
cggatcgtggaactccttgg

SEQ ID NO: 33347 - DNA, 20 bp, Artificial Sequence
  Synthetic
gagcggatcgtggaactcct

SEQ ID NO: 33348 - DNA, 20 bp, Artificial Sequence
  Synthetic
cgatgtagatgagcggatcg

SEQ ID NO: 33349 - DNA, 20 bp, Artificial Sequence
  Synthetic
tccgctcatctacatcgagt

SEQ ID NO: 33350 - DNA, 20 bp, Artificial Sequence
  Synthetic
accgactcgatgtagatgag

SEQ ID NO: 33351 - DNA, 20 bp, Artificial Sequence
  Synthetic
catcgagtcggtccgcgctc

SEQ ID NO: 33352 - DNA, 20 bp, Artificial Sequence
  Synthetic
cgagtcggtccgcgctcagg

SEQ ID NO: 33353 - DNA, 20 bp, Artificial Sequence
  Synthetic
cgaacttctccacctgagcg

SEQ ID NO: 33354 - DNA, 20 bp, Artificial Sequence
  Synthetic
cgcgctcaggtggagaagtt

SEQ ID NO: 33355 - DNA, 20 bp, Artificial Sequence
  Synthetic
gcgctcaggtggagaagttc

SEQ ID NO: 33356 - DNA, 20 bp, Artificial Sequence
  Synthetic
tggagaagttcgggatgtgc

SEQ ID NO: 33357 - DNA, 20 bp, Artificial Sequence
  Synthetic
ggagaagttcgggatgtgca

SEQ ID NO: 33358 - DNA, 20 bp, Artificial Sequence
  Synthetic
aaggactcaagtgaaatacc

SEQ ID NO: 33359 - DNA, 20 bp, Artificial Sequence
  Synthetic
gtgaaatacctggtgctctg

SEQ ID NO: 33360 - DNA, 20 bp, Artificial Sequence
  Synthetic
taaatatgccacagagcacc

SEQ ID NO: 33361 - DNA, 20 bp, Artificial Sequence
  Synthetic
gctctgtggcatatttatgc

SEQ ID NO: 33362 - DNA, 20 bp, Artificial Sequence
  Synthetic
ctctgtggcatatttatgct

SEQ ID NO: 33363 - DNA, 20 bp, Artificial Sequence
  Synthetic
ggaaagatgttgacaagata

SEQ ID NO: 33364 - DNA, 20 bp, Artificial Sequence
  Synthetic
gaaagatgttgacaagataa

SEQ ID NO: 33365 - DNA, 20 bp, Artificial Sequence
  Synthetic
gataagggaatttcttcaaa

SEQ ID NO: 33366 - DNA, 20 bp, Artificial Sequence
  Synthetic
tttcagatttcaaaagaaca

SEQ ID NO: 33367 - DNA, 20 bp, Artificial Sequence
  Synthetic
catgttctggtagaacttca

SEQ ID NO: 33368 - DNA, 20 bp, Artificial Sequence
  Synthetic
tcacgtattggatcatgttc

SEQ ID NO: 33369 - DNA, 20 bp, Artificial Sequence
  Synthetic
atccaatacgtgaccaaagt

SEQ ID NO: 33370 - DNA, 20 bp, Artificial Sequence
  Synthetic
taccaactttggtcacgtat

SEQ ID NO: 33371 - DNA, 20 bp, Artificial Sequence
  Synthetic
ttttgttcacataccaactt

SEQ ID NO: 33372 - DNA, 20 bp, Artificial Sequence
  Synthetic
tgaacaaaaagctccgtcaa

SEQ ID NO: 33373 - DNA, 20 bp, Artificial Sequence
  Synthetic
attcttcaagcagcctttga

SEQ ID NO: 33374 - DNA, 20 bp, Artificial Sequence
  Synthetic
caaaggctgcttgaagaata

SEQ ID NO: 33375 - DNA, 20 bp, Artificial Sequence
  Synthetic
aaggaactgaataagagtac

SEQ ID NO: 33376 - DNA, 20 bp, Artificial Sequence
  Synthetic
tgtactcttattcagttcct

SEQ ID NO: 33377 - DNA, 20 bp, Artificial Sequence
  Synthetic
gcaaaacaatagcatcacca

SEQ ID NO: 33378 - DNA, 20 bp, Artificial Sequence
  Synthetic
tgatgctattgttttgccag

SEQ ID NO: 33379 - DNA, 20 bp, Artificial Sequence
  Synthetic
gatgctattgttttgccagc

SEQ ID NO: 33380 - DNA, 20 bp, Artificial Sequence
  Synthetic
gccagcgggagcacttcatc

SEQ ID NO: 33381 - DNA, 20 bp, Artificial Sequence
  Synthetic
acctgatgaagtgctcccgc

SEQ ID NO: 33382 - DNA, 20 bp, Artificial Sequence
  Synthetic
gaattttcacagctgtattc

SEQ ID NO: 33383 - DNA, 20 bp, Artificial Sequence
  Synthetic
tggcagtggtggtgccagtc

SEQ ID NO: 33384 - DNA, 20 bp, Artificial Sequence
  Synthetic
ggtcatcatgaggtcctgct

SEQ ID NO: 33385 - DNA, 20 bp, Artificial Sequence
  Synthetic
gtcatcatgaggtcctgctc

SEQ ID NO: 33386 - DNA, 20 bp, Artificial Sequence
  Synthetic
gaggccctgcgggaccgcca

SEQ ID NO: 33387 - DNA, 20 bp, Artificial Sequence
  Synthetic
cgtagggcaggttgccgtgg

SEQ ID NO: 33388 - DNA, 20 bp, Artificial Sequence
  Synthetic
cgtcgtagggcaggttgccg

SEQ ID NO: 33389 - DNA, 20 bp, Artificial Sequence
  Synthetic
gggaggtcacgtcgtagggc

SEQ ID NO: 33390 - DNA, 20 bp, Artificial Sequence
  Synthetic
gctggggaggtcacgtcgta

SEQ ID NO: 33391 - DNA, 20 bp, Artificial Sequence
  Synthetic
tgctggggaggtcacgtcgt

SEQ ID NO: 33392 - DNA, 20 bp, Artificial Sequence
  Synthetic
tgtgtcgcagagtgctgggg

SEQ ID NO: 33393 - DNA, 20 bp, Artificial Sequence
  Synthetic
gtgtgtgtcgcagagtgctg

SEQ ID NO: 33394 - DNA, 20 bp, Artificial Sequence
  Synthetic
ggtgtgtgtcgcagagtgct

SEQ ID NO: 33395 - DNA, 20 bp, Artificial Sequence
  Synthetic
aggtgtgtgtcgcagagtgc

SEQ ID NO: 33396 - DNA, 20 bp, Artificial Sequence
  Synthetic
gcgacacacacctgcaccca

SEQ ID NO: 33397 - DNA, 20 bp, Artificial Sequence
  Synthetic
caagctggttccgtgggtgc

SEQ ID NO: 33398 - DNA, 20 bp, Artificial Sequence
  Synthetic
cacccacggaaccagcttgc

SEQ ID NO: 33399 - DNA, 20 bp, Artificial Sequence
  Synthetic
ggccagcaagctggttccgt

SEQ ID NO: 33400 - DNA, 20 bp, Artificial Sequence
  Synthetic
gggccagcaagctggttccg

SEQ ID NO: 33401 - DNA, 20 bp, Artificial Sequence
  Synthetic
ccaagggtgggccagcaagc

SEQ ID NO: 33402 - DNA, 20 bp, Artificial Sequence
  Synthetic
ccagcttgctggcccaccct

SEQ ID NO: 33403 - DNA, 20 bp, Artificial Sequence
  Synthetic
cctgcgtgatctccaagggt

SEQ ID NO: 33404 - DNA, 20 bp, Artificial Sequence
  Synthetic
cccacccttggagatcacgc

SEQ ID NO: 33405 - DNA, 20 bp, Artificial Sequence
  Synthetic
tcctgcgtgatctccaaggg

SEQ ID NO: 33406 - DNA, 20 bp, Artificial Sequence
  Synthetic
gcttcctgcgtgatctccaa

SEQ ID NO: 33407 - DNA, 20 bp, Artificial Sequence
  Synthetic
cgcttcctgcgtgatctcca

SEQ ID NO: 33408 - DNA, 20 bp, Artificial Sequence
  Synthetic
cttggagatcacgcaggaag

SEQ ID NO: 33409 - DNA, 20 bp, Artificial Sequence
  Synthetic
ttggagatcacgcaggaagc

SEQ ID NO: 33410 - DNA, 20 bp, Artificial Sequence
  Synthetic
cacgcaggaagcgggcgaga

SEQ ID NO: 33411 - DNA, 20 bp, Artificial Sequence
  Synthetic
gagatggtgtttgtgcccag

SEQ ID NO: 33412 - DNA, 20 bp, Artificial Sequence
  Synthetic
tggtgtttgtgcccagtggc

SEQ ID NO: 33413 - DNA, 20 bp, Artificial Sequence
  Synthetic
gcccagtggctggcaccacc

SEQ ID NO: 33414 - DNA, 20 bp, Artificial Sequence
  Synthetic
acctggtggtgccagccact

SEQ ID NO: 33415 - DNA, 20 bp, Artificial Sequence
  Synthetic
cacctggtggtgccagccac

SEQ ID NO: 33416 - DNA, 20 bp, Artificial Sequence
  Synthetic
gcaccaccaggtgcacaacc

SEQ ID NO: 33417 - DNA, 20 bp, Artificial Sequence
  Synthetic
ttaccaggttgtgcacctgg

SEQ ID NO: 33418 - DNA, 20 bp, Artificial Sequence
  Synthetic
acattaccaggttgtgcacc

SEQ ID NO: 33419 - DNA, 20 bp, Artificial Sequence
  Synthetic
tgatggagatggtgtcatcc

SEQ ID NO: 33420 - DNA, 20 bp, Artificial Sequence
  Synthetic
ccagttgtggttgatggaga

SEQ ID NO: 33421 - DNA, 20 bp, Artificial Sequence
  Synthetic
ccatctccatcaaccacaac

SEQ ID NO: 33422 - DNA, 20 bp, Artificial Sequence
  Synthetic
catctccatcaaccacaact

SEQ ID NO: 33423 - DNA, 20 bp, Artificial Sequence
  Synthetic
attgacccagttgtggttga

SEQ ID NO: 33424 - DNA, 20 bp, Artificial Sequence
  Synthetic
atcaaccacaactgggtcaa

SEQ ID NO: 33425 - DNA, 20 bp, Artificial Sequence
  Synthetic
tgaagccattgacccagttg

SEQ ID NO: 33426 - DNA, 20 bp, Artificial Sequence
  Synthetic
ctgggtcaatggcttcaacc

SEQ ID NO: 33427 - DNA, 20 bp, Artificial Sequence
  Synthetic
gcttcaacctggccaacatg

SEQ ID NO: 33428 - DNA, 20 bp, Artificial Sequence
  Synthetic
agaagcgccacatgttggcc

SEQ ID NO: 33429 - DNA, 20 bp, Artificial Sequence
  Synthetic
ctgcaagaagcgccacatgt

SEQ ID NO: 33430 - DNA, 20 bp, Artificial Sequence
  Synthetic
catgtggcgcttcttgcagc

SEQ ID NO: 33431 - DNA, 20 bp, Artificial Sequence
  Synthetic
gcaggagctatgcgccgtgc

SEQ ID NO: 33432 - DNA, 20 bp, Artificial Sequence
  Synthetic
ggagctatgcgccgtgcagg

SEQ ID NO: 33433 - DNA, 20 bp, Artificial Sequence
  Synthetic
gctatgcgccgtgcaggagg

SEQ ID NO: 33434 - DNA, 20 bp, Artificial Sequence
  Synthetic
ctcgctgacctcctcctgca

SEQ ID NO: 33435 - DNA, 20 bp, Artificial Sequence
  Synthetic
tgcaggaggaggtcagcgag

SEQ ID NO: 33436 - DNA, 20 bp, Artificial Sequence
  Synthetic
aggaggaggtcagcgagtgg

SEQ ID NO: 33437 - DNA, 20 bp, Artificial Sequence
  Synthetic
ggaggaggtcagcgagtgga

SEQ ID NO: 33438 - DNA, 20 bp, Artificial Sequence
  Synthetic
ggagggactccatgcccgac

SEQ ID NO: 33439 - DNA, 20 bp, Artificial Sequence
  Synthetic
gtggtggtgccagtcgggca

SEQ ID NO: 33440 - DNA, 20 bp, Artificial Sequence
  Synthetic
ctggcagtggtggtgccagt

SEQ ID NO: 33441 - DNA, 20 bp, Artificial Sequence
  Synthetic
cgactggcaccaccactgcc

SEQ ID NO: 33442 - DNA, 20 bp, Artificial Sequence
  Synthetic
ctggcaccaccactgccagg

SEQ ID NO: 33443 - DNA, 20 bp, Artificial Sequence
  Synthetic
tggcaccaccactgccaggt

SEQ ID NO: 33444 - DNA, 20 bp, Artificial Sequence
  Synthetic
gccaccccacctggcagtgg

SEQ ID NO: 33445 - DNA, 20 bp, Artificial Sequence
  Synthetic
gtagccaccccacctggcag

SEQ ID NO: 33446 - DNA, 20 bp, Artificial Sequence
  Synthetic
cctctgcccaggtcatcatg

SEQ ID NO: 33447 - DNA, 20 bp, Artificial Sequence
  Synthetic
agcaggacctcatgatgacc

SEQ ID NO: 33448 - DNA, 20 bp, Artificial Sequence
  Synthetic
ttcaaagttgatgcccgagc

SEQ ID NO: 33449 - DNA, 20 bp, Artificial Sequence
  Synthetic
attctgtaggtggtttgtga

SEQ ID NO: 33450 - DNA, 20 bp, Artificial Sequence
  Synthetic
ttctgtaggtggtttgtgat

SEQ ID NO: 33451 - DNA, 20 bp, Artificial Sequence
  Synthetic
tctgtaggtggtttgtgatg

SEQ ID NO: 33452 - DNA, 20 bp, Artificial Sequence
  Synthetic
gtgatggggccaccacgctc

SEQ ID NO: 33453 - DNA, 20 bp, Artificial Sequence
  Synthetic
gggccaccacgctccggaac

SEQ ID NO: 33454 - DNA, 20 bp, Artificial Sequence
  Synthetic
ggccaccacgctccggaact

SEQ ID NO: 33455 - DNA, 20 bp, Artificial Sequence
  Synthetic
atcccagttccggagcgtgg

SEQ ID NO: 33456 - DNA, 20 bp, Artificial Sequence
  Synthetic
tgaatcccagttccggagcg

SEQ ID NO: 33457 - DNA, 20 bp, Artificial Sequence
  Synthetic
gtcgatgtgaatcccagttc

SEQ ID NO: 33458 - DNA, 20 bp, Artificial Sequence
  Synthetic
tgggattcacatcgaccctc

SEQ ID NO: 33459 - DNA, 20 bp, Artificial Sequence
  Synthetic
gggattcacatcgaccctct

SEQ ID NO: 33460 - DNA, 20 bp, Artificial Sequence
  Synthetic
accctctgggaaccagtgcc

SEQ ID NO: 33461 - DNA, 20 bp, Artificial Sequence
  Synthetic
tccaggcactggttcccaga

SEQ ID NO: 33462 - DNA, 20 bp, Artificial Sequence
  Synthetic
ttccaggcactggttcccag

SEQ ID NO: 33463 - DNA, 20 bp, Artificial Sequence
  Synthetic
aactaaggcattccaggcac

SEQ ID NO: 33464 - DNA, 20 bp, Artificial Sequence
  Synthetic
tgcctggaatgccttagttc

SEQ ID NO: 33465 - DNA, 20 bp, Artificial Sequence
  Synthetic
gcctggaatgccttagttca

SEQ ID NO: 33466 - DNA, 20 bp, Artificial Sequence
  Synthetic
gccctgaactaaggcattcc

SEQ ID NO: 33467 - DNA, 20 bp, Artificial Sequence
  Synthetic
gcgcttgtggccctgaacta

SEQ ID NO: 33468 - DNA, 20 bp, Artificial Sequence
  Synthetic
tagttcagggccacaagcgc

SEQ ID NO: 33469 - DNA, 20 bp, Artificial Sequence
  Synthetic
gaaacaggcaccagcgcttg

SEQ ID NO: 33470 - DNA, 20 bp, Artificial Sequence
  Synthetic
tgggagtgctggtaggaaac

SEQ ID NO: 33471 - DNA, 20 bp, Artificial Sequence
  Synthetic
tgtttcctaccagcactccc

SEQ ID NO: 33472 - DNA, 20 bp, Artificial Sequence
  Synthetic
gtttcctaccagcactccca

SEQ ID NO: 33473 - DNA, 20 bp, Artificial Sequence
  Synthetic
agttccctgggagtgctggt

SEQ ID NO: 33474 - DNA, 20 bp, Artificial Sequence
  Synthetic
gatgagttccctgggagtgc

SEQ ID NO: 33475 - DNA, 20 bp, Artificial Sequence
  Synthetic
gtcactttgatgagttccct

SEQ ID NO: 33476 - DNA, 20 bp, Artificial Sequence
  Synthetic
ggtcactttgatgagttccc

SEQ ID NO: 33477 - DNA, 20 bp, Artificial Sequence
  Synthetic
atcaaagtgacccgagacga

SEQ ID NO: 33478 - DNA, 20 bp, Artificial Sequence
  Synthetic
aaagtgacccgagacgaagg

SEQ ID NO: 33479 - DNA, 20 bp, Artificial Sequence
  Synthetic
aagtgacccgagacgaagga

SEQ ID NO: 33480 - DNA, 20 bp, Artificial Sequence
  Synthetic
ctggttccctccttcgtctc

SEQ ID NO: 33481 - DNA, 20 bp, Artificial Sequence
  Synthetic
gctggttccctccttcgtct

SEQ ID NO: 33482 - DNA, 20 bp, Artificial Sequence
  Synthetic
aggtaatagcttcgtcttgc

SEQ ID NO: 33483 - DNA, 20 bp, Artificial Sequence
  Synthetic
agcaagacgaagctattacc

SEQ ID NO: 33484 - DNA, 20 bp, Artificial Sequence
  Synthetic
gggataaataacattaaacc

SEQ ID NO: 33485 - DNA, 20 bp, Artificial Sequence
  Synthetic
ggtttaatgttatttatccc

SEQ ID NO: 33486 - DNA, 20 bp, Artificial Sequence
  Synthetic
caggttggaagctgtgtccg

SEQ ID NO: 33487 - DNA, 20 bp, Artificial Sequence
  Synthetic
ccaggttggaagctgtgtcc

SEQ ID NO: 33488 - DNA, 20 bp, Artificial Sequence
  Synthetic
cccggacacagcttccaacc

SEQ ID NO: 33489 - DNA, 20 bp, Artificial Sequence
  Synthetic
gccaggttggaagctgtgtc

SEQ ID NO: 33490 - DNA, 20 bp, Artificial Sequence
  Synthetic
ttgaattcaggtggccaggt

SEQ ID NO: 33491 - DNA, 20 bp, Artificial Sequence
  Synthetic
gggtttgaattcaggtggcc

SEQ ID NO: 33492 - DNA, 20 bp, Artificial Sequence
  Synthetic
gccacctgaattcaaacccc

SEQ ID NO: 33493 - DNA, 20 bp, Artificial Sequence
  Synthetic
tccaggggtttgaattcagg

SEQ ID NO: 33494 - DNA, 20 bp, Artificial Sequence
  Synthetic
atttccaggggtttgaattc

SEQ ID NO: 33495 - DNA, 20 bp, Artificial Sequence
  Synthetic
ggtttttgtaagatttccag

SEQ ID NO: 33496 - DNA, 20 bp, Artificial Sequence
  Synthetic
tggtttttgtaagatttcca

SEQ ID NO: 33497 - DNA, 20 bp, Artificial Sequence
  Synthetic
ctggtttttgtaagatttcc

SEQ ID NO: 33498 - DNA, 20 bp, Artificial Sequence
  Synthetic
ctggaaatcttacaaaaacc

SEQ ID NO: 33499 - DNA, 20 bp, Artificial Sequence
  Synthetic
ggtacaaagacagtctctcc

SEQ ID NO: 33500 - DNA, 20 bp, Artificial Sequence
  Synthetic
ggagagactgtctttgtacc

SEQ ID NO: 33501 - DNA, 20 bp, Artificial Sequence
  Synthetic
tttgttggatttcaggaggc

SEQ ID NO: 33502 - DNA, 20 bp, Artificial Sequence
  Synthetic
gttggatttcaggaggctgg

SEQ ID NO: 33503 - DNA, 20 bp, Artificial Sequence
  Synthetic
cgatagtagtgtcgagattg

SEQ ID NO: 33504 - DNA, 20 bp, Artificial Sequence
  Synthetic
gctggcaaaattttgggtga

SEQ ID NO: 33505 - DNA, 20 bp, Artificial Sequence
  Synthetic
ggtgctgctggcaaaatttt

SEQ ID NO: 33506 - DNA, 20 bp, Artificial Sequence
  Synthetic
tggtgctgctggcaaaattt

SEQ ID NO: 33507 - DNA, 20 bp, Artificial Sequence
  Synthetic
cacaaccctcaaaaacctgc

SEQ ID NO: 33508 - DNA, 20 bp, Artificial Sequence
  Synthetic
ttgggccagcaggtttttga

SEQ ID NO: 33509 - DNA, 20 bp, Artificial Sequence
  Synthetic
tttgggccagcaggtttttg

SEQ ID NO: 33510 - DNA, 20 bp, Artificial Sequence
  Synthetic
aaacctgctggcccaaatca

SEQ ID NO: 33511 - DNA, 20 bp, Artificial Sequence
  Synthetic
ccaccttgatttgggccagc

SEQ ID NO: 33512 - DNA, 20 bp, Artificial Sequence
  Synthetic
cctgctggcccaaatcaagg

SEQ ID NO: 33513 - DNA, 20 bp, Artificial Sequence
  Synthetic
ctgctggcccaaatcaaggt

SEQ ID NO: 33514 - DNA, 20 bp, Artificial Sequence
  Synthetic
tggtctccccaccttgattt

SEQ ID NO: 33515 - DNA, 20 bp, Artificial Sequence
  Synthetic
ctggtctccccaccttgatt

SEQ ID NO: 33516 - DNA, 20 bp, Artificial Sequence
  Synthetic
tccagtctcaccccagtgcc

SEQ ID NO: 33517 - DNA, 20 bp, Artificial Sequence
  Synthetic
gccaggcactggggtgagac

SEQ ID NO: 33518 - DNA, 20 bp, Artificial Sequence
  Synthetic
ccatgaagggccaggcactg

SEQ ID NO: 33519 - DNA, 20 bp, Artificial Sequence
  Synthetic
ccccagtgcctggcccttca

SEQ ID NO: 33520 - DNA, 20 bp, Artificial Sequence
  Synthetic
tccatgaagggccaggcact

SEQ ID NO: 33521 - DNA, 20 bp, Artificial Sequence
  Synthetic
ctccatgaagggccaggcac

SEQ ID NO: 33522 - DNA, 20 bp, Artificial Sequence
  Synthetic
cacaggctccatgaagggcc

SEQ ID NO: 33523 - DNA, 20 bp, Artificial Sequence
  Synthetic
ttcttcacaggctccatgaa

SEQ ID NO: 33524 - DNA, 20 bp, Artificial Sequence
  Synthetic
cttcttcacaggctccatga

SEQ ID NO: 33525 - DNA, 20 bp, Artificial Sequence
  Synthetic
catggagcctgtgaagaagt

SEQ ID NO: 33526 - DNA, 20 bp, Artificial Sequence
  Synthetic
ggagcctgtgaagaagtcgg

SEQ ID NO: 33527 - DNA, 20 bp, Artificial Sequence
  Synthetic
ggggcctccgacttcttcac

SEQ ID NO: 33528 - DNA, 20 bp, Artificial Sequence
  Synthetic
ggaggcccctgactactacg

SEQ ID NO: 33529 - DNA, 20 bp, Artificial Sequence
  Synthetic
gatgacctcgtagtagtcag

SEQ ID NO: 33530 - DNA, 20 bp, Artificial Sequence
  Synthetic
ggatgacctcgtagtagtca

SEQ ID NO: 33531 - DNA, 20 bp, Artificial Sequence
  Synthetic
cggatgacctcgtagtagtc

SEQ ID NO: 33532 - DNA, 20 bp, Artificial Sequence
  Synthetic
gaggtcatccgcttccccat

SEQ ID NO: 33533 - DNA, 20 bp, Artificial Sequence
  Synthetic
ggtcctcaccaatggggaag

SEQ ID NO: 33534 - DNA, 20 bp, Artificial Sequence
  Synthetic
atggaaggtcctcaccaatg

SEQ ID NO: 33535 - DNA, 20 bp, Artificial Sequence
  Synthetic
aatggaaggtcctcaccaat

SEQ ID NO: 33536 - DNA, 20 bp, Artificial Sequence
  Synthetic
gaatggaaggtcctcaccaa

SEQ ID NO: 33537 - DNA, 20 bp, Artificial Sequence
  Synthetic
tcagtcatggtcttcaggtc

SEQ ID NO: 33538 - DNA, 20 bp, Artificial Sequence
  Synthetic
acctgaagaccatgactgag

SEQ ID NO: 33539 - DNA, 20 bp, Artificial Sequence
  Synthetic
gccgctcagtcatggtcttc

SEQ ID NO: 33540 - DNA, 20 bp, Artificial Sequence
  Synthetic
gcttcgcagccgctcagtca

SEQ ID NO: 33541 - DNA, 20 bp, Artificial Sequence
  Synthetic
gaagccgctactacgtgacc

SEQ ID NO: 33542 - DNA, 20 bp, Artificial Sequence
  Synthetic
gcttccgggtcacgtagtag

SEQ ID NO: 33543 - DNA, 20 bp, Artificial Sequence
  Synthetic
cgtgacccggaagctctttg

SEQ ID NO: 33544 - DNA, 20 bp, Artificial Sequence
  Synthetic
gtcggccacaaagagcttcc

SEQ ID NO: 33545 - DNA, 20 bp, Artificial Sequence
  Synthetic
ggtcggccacaaagagcttc

SEQ ID NO: 33546 - DNA, 20 bp, Artificial Sequence
  Synthetic
tctttgtggccgacctgcag

SEQ ID NO: 33547 - DNA, 20 bp, Artificial Sequence
  Synthetic
ctttgtggccgacctgcagc

SEQ ID NO: 33548 - DNA, 20 bp, Artificial Sequence
  Synthetic
ggcgatgacccgctgcaggt

SEQ ID NO: 33549 - DNA, 20 bp, Artificial Sequence
  Synthetic
agttggcgatgacccgctgc

SEQ ID NO: 33550 - DNA, 20 bp, Artificial Sequence
  Synthetic
ggggttgtactcgcgacagt

SEQ ID NO: 33551 - DNA, 20 bp, Artificial Sequence
  Synthetic
ctgtcgcgagtacaaccccc

SEQ ID NO: 33552 - DNA, 20 bp, Artificial Sequence
  Synthetic
ggcagtactcgctgtccggg

SEQ ID NO: 33553 - DNA, 20 bp, Artificial Sequence
  Synthetic
cggcagtactcgctgtccgg

SEQ ID NO: 33554 - DNA, 20 bp, Artificial Sequence
  Synthetic
gcggcagtactcgctgtccg

SEQ ID NO: 33555 - DNA, 20 bp, Artificial Sequence
  Synthetic
agcggcagtactcgctgtcc

SEQ ID NO: 33556 - DNA, 20 bp, Artificial Sequence
  Synthetic
cagcggcagtactcgctgtc

SEQ ID NO: 33557 - DNA, 20 bp, Artificial Sequence
  Synthetic
tctccagggcgctggcacag

SEQ ID NO: 33558 - DNA, 20 bp, Artificial Sequence
  Synthetic
agcagcagcgcgccagtcag

SEQ ID NO: 33559 - DNA, 20 bp, Artificial Sequence
  Synthetic
gcagcgcgccagtcagagga

SEQ ID NO: 33560 - DNA, 20 bp, Artificial Sequence
  Synthetic
gacttgcgccttcctctgac

SEQ ID NO: 33561 - DNA, 20 bp, Artificial Sequence
  Synthetic
gtcagaggaaggcgcaagtc

SEQ ID NO: 33562 - DNA, 20 bp, Artificial Sequence
  Synthetic
tcagaggaaggcgcaagtcc

SEQ ID NO: 33563 - DNA, 20 bp, Artificial Sequence
  Synthetic
cagaggaaggcgcaagtccg

SEQ ID NO: 33564 - DNA, 20 bp, Artificial Sequence
  Synthetic
agaggaaggcgcaagtccgg

SEQ ID NO: 33565 - DNA, 20 bp, Artificial Sequence
  Synthetic
tcttggcgcgcggcagcccc

SEQ ID NO: 33566 - DNA, 20 bp, Artificial Sequence
  Synthetic
ttctcaagcttcttggcgcg

SEQ ID NO: 33567 - DNA, 20 bp, Artificial Sequence
  Synthetic
gccaagaagcttgagaagct

SEQ ID NO: 33568 - DNA, 20 bp, Artificial Sequence
  Synthetic
ccctagcttctcaagcttct

SEQ ID NO: 33569 - DNA, 20 bp, Artificial Sequence
  Synthetic
ccaagaagcttgagaagcta

SEQ ID NO: 33570 - DNA, 20 bp, Artificial Sequence
  Synthetic
caagaagcttgagaagctag

SEQ ID NO: 33571 - DNA, 20 bp, Artificial Sequence
  Synthetic
tgagaagctaggggtcttct

SEQ ID NO: 33572 - DNA, 20 bp, Artificial Sequence
  Synthetic
aggggtcttctcggcttgca

SEQ ID NO: 33573 - DNA, 20 bp, Artificial Sequence
  Synthetic
ggtcttctcggcttgcaagg

SEQ ID NO: 33574 - DNA, 20 bp, Artificial Sequence
  Synthetic
gtcttctcggcttgcaaggt

SEQ ID NO: 33575 - DNA, 20 bp, Artificial Sequence
  Synthetic
acttacaggtttcattggcc

SEQ ID NO: 33576 - DNA, 20 bp, Artificial Sequence
  Synthetic
attacacttacaggtttcat

SEQ ID NO: 33577 - DNA, 20 bp, Artificial Sequence
  Synthetic
aatgaaacctgtaagtgtaa

SEQ ID NO: 33578 - DNA, 20 bp, Artificial Sequence
  Synthetic
aaacctgtaagtgtaatggc

SEQ ID NO: 33579 - DNA, 20 bp, Artificial Sequence
  Synthetic
tttccagccattacacttac

SEQ ID NO: 33580 - DNA, 20 bp, Artificial Sequence
  Synthetic
ggggtgcagtggggggcttg

SEQ ID NO: 33581 - DNA, 20 bp, Artificial Sequence
  Synthetic
cggggtgcagtggggggctt

SEQ ID NO: 33582 - DNA, 20 bp, Artificial Sequence
  Synthetic
gcggggtgcagtggggggct

SEQ ID NO: 33583 - DNA, 20 bp, Artificial Sequence
  Synthetic
gccccccactgcaccccgca

SEQ ID NO: 33584 - DNA, 20 bp, Artificial Sequence
  Synthetic
tccatgcggggtgcagtggg

SEQ ID NO: 33585 - DNA, 20 bp, Artificial Sequence
  Synthetic
atccatgcggggtgcagtgg

SEQ ID NO: 33586 - DNA, 20 bp, Artificial Sequence
  Synthetic
gatccatgcggggtgcagtg

SEQ ID NO: 33587 - DNA, 20 bp, Artificial Sequence
  Synthetic
agatccatgcggggtgcagt

SEQ ID NO: 33588 - DNA, 20 bp, Artificial Sequence
  Synthetic
cagatccatgcggggtgcag

SEQ ID NO: 33589 - DNA, 20 bp, Artificial Sequence
  Synthetic
ggctgctgcagatccatgcg

SEQ ID NO: 33590 - DNA, 20 bp, Artificial Sequence
  Synthetic
tggctgctgcagatccatgc

SEQ ID NO: 33591 - DNA, 20 bp, Artificial Sequence
  Synthetic
ctggctgctgcagatccatg

SEQ ID NO: 33592 - DNA, 20 bp, Artificial Sequence
  Synthetic
agctcactcaggttggcagc

SEQ ID NO: 33593 - DNA, 20 bp, Artificial Sequence
  Synthetic
gcggcacagctcactcaggt

SEQ ID NO: 33594 - DNA, 20 bp, Artificial Sequence
  Synthetic
aactgcggcacagctcactc

SEQ ID NO: 33595 - DNA, 20 bp, Artificial Sequence
  Synthetic
ccaaggggtgctcacaactg

SEQ ID NO: 33596 - DNA, 20 bp, Artificial Sequence
  Synthetic
ccgcagttgtgagcacccct

SEQ ID NO: 33597 - DNA, 20 bp, Artificial Sequence
  Synthetic
cgcagttgtgagcacccctt

SEQ ID NO: 33598 - DNA, 20 bp, Artificial Sequence
  Synthetic
cgctgcctgccttacccaag

SEQ ID NO: 33599 - DNA, 20 bp, Artificial Sequence
  Synthetic
gcgctgcctgccttacccaa

SEQ ID NO: 33600 - DNA, 20 bp, Artificial Sequence
  Synthetic
ggcgctgcctgccttaccca

SEQ ID NO: 33601 - DNA, 20 bp, Artificial Sequence
  Synthetic
agctgaccacgtatcccact

SEQ ID NO: 33602 - DNA, 20 bp, Artificial Sequence
  Synthetic
cattctccaagtgggatacg

SEQ ID NO: 33603 - DNA, 20 bp, Artificial Sequence
  Synthetic
ctctgacacattctccaagt

SEQ ID NO: 33604 - DNA, 20 bp, Artificial Sequence
  Synthetic
cctctgacacattctccaag

SEQ ID NO: 33605 - DNA, 20 bp, Artificial Sequence
  Synthetic
ccacttggagaatgtgtcag

SEQ ID NO: 33606 - DNA, 20 bp, Artificial Sequence
  Synthetic
ggatgagataaaccgactgc

SEQ ID NO: 33607 - DNA, 20 bp, Artificial Sequence
  Synthetic
gatgagataaaccgactgct

SEQ ID NO: 33608 - DNA, 20 bp, Artificial Sequence
  Synthetic
atgagataaaccgactgctg

SEQ ID NO: 33609 - DNA, 20 bp, Artificial Sequence
  Synthetic
gataaaccgactgctgggga

SEQ ID NO: 33610 - DNA, 20 bp, Artificial Sequence
  Synthetic
aaaccgactgctggggatgg

SEQ ID NO: 33611 - DNA, 20 bp, Artificial Sequence
  Synthetic
ccaccaccatccccagcagt

SEQ ID NO: 33612 - DNA, 20 bp, Artificial Sequence
  Synthetic
ccgactgctggggatggtgg

SEQ ID NO: 33613 - DNA, 20 bp, Artificial Sequence
  Synthetic
gctggggatggtggtggatg

SEQ ID NO: 33614 - DNA, 20 bp, Artificial Sequence
  Synthetic
tctcttcatgtctgttcaca

SEQ ID NO: 33615 - DNA, 20 bp, Artificial Sequence
  Synthetic
catgtctgttcacaaggaag

SEQ ID NO: 33616 - DNA, 20 bp, Artificial Sequence
  Synthetic
agaggacacagacaccaagc

SEQ ID NO: 33617 - DNA, 20 bp, Artificial Sequence
  Synthetic
gaggtagaaatagacctgct

SEQ ID NO: 33618 - DNA, 20 bp, Artificial Sequence
  Synthetic
ggtctatttctacctcttca

SEQ ID NO: 33619 - DNA, 20 bp, Artificial Sequence
  Synthetic
agtggaagctcaccttgaag

SEQ ID NO: 33620 - DNA, 20 bp, Artificial Sequence
  Synthetic
cctcttctctctagctactg

SEQ ID NO: 33621 - DNA, 20 bp, Artificial Sequence
  Synthetic
aatgcatcctgcagatgacc

SEQ ID NO: 33622 - DNA, 20 bp, Artificial Sequence
  Synthetic
ccacaggccgggtcatctgc

SEQ ID NO: 33623 - DNA, 20 bp, Artificial Sequence
  Synthetic
cctgcagatgacccggcctg

SEQ ID NO: 33624 - DNA, 20 bp, Artificial Sequence
  Synthetic
gcagatgacccggcctgtgg

SEQ ID NO: 33625 - DNA, 20 bp, Artificial Sequence
  Synthetic
gatgacccggcctgtggtgg

SEQ ID NO: 33626 - DNA, 20 bp, Artificial Sequence
  Synthetic
atgacccggcctgtggtgga

SEQ ID NO: 33627 - DNA, 20 bp, Artificial Sequence
  Synthetic
tgacccggcctgtggtggag

SEQ ID NO: 33628 - DNA, 20 bp, Artificial Sequence
  Synthetic
ggacccctccaccacaggcc

SEQ ID NO: 33629 - DNA, 20 bp, Artificial Sequence
  Synthetic
gggacccctccaccacaggc

SEQ ID NO: 33630 - DNA, 20 bp, Artificial Sequence
  Synthetic
gcctgtggtggaggggtccc

SEQ ID NO: 33631 - DNA, 20 bp, Artificial Sequence
  Synthetic
cccagggacccctccaccac

SEQ ID NO: 33632 - DNA, 20 bp, Artificial Sequence
  Synthetic
cctgtggtggaggggtccct

SEQ ID NO: 33633 - DNA, 20 bp, Artificial Sequence
  Synthetic
ctcaaatggagggctgccca

SEQ ID NO: 33634 - DNA, 20 bp, Artificial Sequence
  Synthetic
tctcaaatggagggctgccc

SEQ ID NO: 33635 - DNA, 20 bp, Artificial Sequence
  Synthetic
tattaggtttctcaaatgga

SEQ ID NO: 33636 - DNA, 20 bp, Artificial Sequence
  Synthetic
atattaggtttctcaaatgg

SEQ ID NO: 33637 - DNA, 20 bp, Artificial Sequence
  Synthetic
tcaatattaggtttctcaaa

SEQ ID NO: 33638 - DNA, 20 bp, Artificial Sequence
  Synthetic
tgagaaacctaatattgagc

SEQ ID NO: 33639 - DNA, 20 bp, Artificial Sequence
  Synthetic
tatctcacctgctcaatatt

SEQ ID NO: 33640 - DNA, 20 bp, Artificial Sequence
  Synthetic
gcagtacaagtttagtcacc

SEQ ID NO: 33641 - DNA, 20 bp, Artificial Sequence
  Synthetic
agtttagtcacctggctccc

SEQ ID NO: 33642 - DNA, 20 bp, Artificial Sequence
  Synthetic
gtttagtcacctggctcccc

SEQ ID NO: 33643 - DNA, 20 bp, Artificial Sequence
  Synthetic
gtcacctggctccccgggag

SEQ ID NO: 33644 - DNA, 20 bp, Artificial Sequence
  Synthetic
tctgccgctcccggggagcc

SEQ ID NO: 33645 - DNA, 20 bp, Artificial Sequence
  Synthetic
aacatcgtctgccgctcccg

SEQ ID NO: 33646 - DNA, 20 bp, Artificial Sequence
  Synthetic
gaacatcgtctgccgctccc

SEQ ID NO: 33647 - DNA, 20 bp, Artificial Sequence
  Synthetic
cgaacatcgtctgccgctcc

SEQ ID NO: 33648 - DNA, 20 bp, Artificial Sequence
  Synthetic
tcttgctctgccttaactac

SEQ ID NO: 33649 - DNA, 20 bp, Artificial Sequence
  Synthetic
tctcaagcttccagtagtta

SEQ ID NO: 33650 - DNA, 20 bp, Artificial Sequence
  Synthetic
ttgagacacctgcccagttt

SEQ ID NO: 33651 - DNA, 20 bp, Artificial Sequence
  Synthetic
cacctgcccagtttcggcag

SEQ ID NO: 33652 - DNA, 20 bp, Artificial Sequence
  Synthetic
gacctctgccgaaactgggc

SEQ ID NO: 33653 - DNA, 20 bp, Artificial Sequence
  Synthetic
ctgagacctctgccgaaact

SEQ ID NO: 33654 - DNA, 20 bp, Artificial Sequence
  Synthetic
cctgagacctctgccgaaac

SEQ ID NO: 33655 - DNA, 20 bp, Artificial Sequence
  Synthetic
ccagtttcggcagaggtctc

SEQ ID NO: 33656 - DNA, 20 bp, Artificial Sequence
  Synthetic
tcggcagaggtctcaggctg

SEQ ID NO: 33657 - DNA, 20 bp, Artificial Sequence
  Synthetic
gaggtctcaggctgaggacg

SEQ ID NO: 33658 - DNA, 20 bp, Artificial Sequence
  Synthetic
tgaggacgtggctacctaca

SEQ ID NO: 33659 - DNA, 20 bp, Artificial Sequence
  Synthetic
cctggtgtaattgaccttgt

SEQ ID NO: 33660 - DNA, 20 bp, Artificial Sequence
  Synthetic
cctacaaggtcaattacacc

SEQ ID NO: 33661 - DNA, 20 bp, Artificial Sequence
  Synthetic
caaggtcaattacaccaggt

SEQ ID NO: 33662 - DNA, 20 bp, Artificial Sequence
  Synthetic
gtggcagtaacagagccatc

SEQ ID NO: 33663 - DNA, 20 bp, Artificial Sequence
  Synthetic
tatcacagctctggggcacg

SEQ ID NO: 33664 - DNA, 20 bp, Artificial Sequence
  Synthetic
gggaggctatcacagctctg

SEQ ID NO: 33665 - DNA, 20 bp, Artificial Sequence
  Synthetic
ggggaggctatcacagctct

SEQ ID NO: 33666 - DNA, 20 bp, Artificial Sequence
  Synthetic
gggggaggctatcacagctc

SEQ ID NO: 33667 - DNA, 20 bp, Artificial Sequence
  Synthetic
gagtggtttcgtagcggggg

SEQ ID NO: 33668 - DNA, 20 bp, Artificial Sequence
  Synthetic
catgagtggtttcgtagcgg

SEQ ID NO: 33669 - DNA, 20 bp, Artificial Sequence
  Synthetic
acatgagtggtttcgtagcg

SEQ ID NO: 33670 - DNA, 20 bp, Artificial Sequence
  Synthetic
gacatgagtggtttcgtagc

SEQ ID NO: 33671 - DNA, 20 bp, Artificial Sequence
  Synthetic
agacatgagtggtttcgtag

SEQ ID NO: 33672 - DNA, 20 bp, Artificial Sequence
  Synthetic
tacgaaaccactcatgtctt

SEQ ID NO: 33673 - DNA, 20 bp, Artificial Sequence
  Synthetic
acgaaaccactcatgtcttt

SEQ ID NO: 33674 - DNA, 20 bp, Artificial Sequence
  Synthetic
gcttcgcccaaagacatgag

SEQ ID NO: 33675 - DNA, 20 bp, Artificial Sequence
  Synthetic
tctttgggcgaagccttctc

SEQ ID NO: 33676 - DNA, 20 bp, Artificial Sequence
  Synthetic
cggtgaaaatggaccggaga

SEQ ID NO: 33677 - DNA, 20 bp, Artificial Sequence
  Synthetic
gggtaacggtgaaaatggac

SEQ ID NO: 33678 - DNA, 20 bp, Artificial Sequence
  Synthetic
ccggcgggtaacggtgaaaa

SEQ ID NO: 33679 - DNA, 20 bp, Artificial Sequence
  Synthetic
ccattttcaccgttacccgc

SEQ ID NO: 33680 - DNA, 20 bp, Artificial Sequence
  Synthetic
cagcagctgccggcgggtaa

SEQ ID NO: 33681 - DNA, 20 bp, Artificial Sequence
  Synthetic
cgttacccgccggcagctgc

SEQ ID NO: 33682 - DNA, 20 bp, Artificial Sequence
  Synthetic
cttttccagcagctgccggc

SEQ ID NO: 33683 - DNA, 20 bp, Artificial Sequence
  Synthetic
acttttccagcagctgccgg

SEQ ID NO: 33684 - DNA, 20 bp, Artificial Sequence
  Synthetic
ggaacttttccagcagctgc

SEQ ID NO: 33685 - DNA, 20 bp, Artificial Sequence
  Synthetic
tcttaggaagcacaagactc

SEQ ID NO: 33686 - DNA, 20 bp, Artificial Sequence
  Synthetic
caagactctggccttgatca

SEQ ID NO: 33687 - DNA, 20 bp, Artificial Sequence
  Synthetic
actctggccttgatcaagga

SEQ ID NO: 33688 - DNA, 20 bp, Artificial Sequence
  Synthetic
ctctggccttgatcaaggat

SEQ ID NO: 33689 - DNA, 20 bp, Artificial Sequence
  Synthetic
tggccttgatcaaggatggg

SEQ ID NO: 33690 - DNA, 20 bp, Artificial Sequence
  Synthetic
ggccttgatcaaggatgggc

SEQ ID NO: 33691 - DNA, 20 bp, Artificial Sequence
  Synthetic
gacccgcccatccttgatca

SEQ ID NO: 33692 - DNA, 20 bp, Artificial Sequence
  Synthetic
atcaaggatgggcgggtcat

SEQ ID NO: 33693 - DNA, 20 bp, Artificial Sequence
  Synthetic
aaggatgggcgggtcatcgg

SEQ ID NO: 33694 - DNA, 20 bp, Artificial Sequence
  Synthetic
cttccgcatgtttcccaccc

SEQ ID NO: 33695 - DNA, 20 bp, Artificial Sequence
  Synthetic
ttccgcatgtttcccaccca

SEQ ID NO: 33696 - DNA, 20 bp, Artificial Sequence
  Synthetic
agccctgggtgggaaacatg

SEQ ID NO: 33697 - DNA, 20 bp, Artificial Sequence
  Synthetic
gtttcccacccagggcttca

SEQ ID NO: 33698 - DNA, 20 bp, Artificial Sequence
  Synthetic
atctccgtgaagccctgggt

SEQ ID NO: 33699 - DNA, 20 bp, Artificial Sequence
  Synthetic
aatctccgtgaagccctggg

SEQ ID NO: 33700 - DNA, 20 bp, Artificial Sequence
  Synthetic
gacaatctccgtgaagccct

SEQ ID NO: 33701 - DNA, 20 bp, Artificial Sequence
  Synthetic
agacaatctccgtgaagccc

SEQ ID NO: 33702 - DNA, 20 bp, Artificial Sequence
  Synthetic
tgctgtcacctcgaatgagc

SEQ ID NO: 33703 - DNA, 20 bp, Artificial Sequence
  Synthetic
cacctcgaatgagcaggtca

SEQ ID NO: 33704 - DNA, 20 bp, Artificial Sequence
  Synthetic
caccttgacctgctcattcg

SEQ ID NO: 33705 - DNA, 20 bp, Artificial Sequence
  Synthetic
ttccctcccccgcagggtta

SEQ ID NO: 33706 - DNA, 20 bp, Artificial Sequence
  Synthetic
tccctcccccgcagggttat

SEQ ID NO: 33707 - DNA, 20 bp, Artificial Sequence
  Synthetic
cttcaggtggttcatcaggt

SEQ ID NO: 33708 - DNA, 20 bp, Artificial Sequence
  Synthetic
ccttcaggtggttcatcagg

SEQ ID NO: 33709 - DNA, 20 bp, Artificial Sequence
  Synthetic
ccacctgatgaaccacctga

SEQ ID NO: 33710 - DNA, 20 bp, Artificial Sequence
  Synthetic
actccttcaggtggttcatc

SEQ ID NO: 33711 - DNA, 20 bp, Artificial Sequence
  Synthetic
tgatgtgatactccttcagg

SEQ ID NO: 33712 - DNA, 20 bp, Artificial Sequence
  Synthetic
gcttgatgtgatactccttc

SEQ ID NO: 33713 - DNA, 20 bp, Artificial Sequence
  Synthetic
cgtactcgtcggcgtaggtg

SEQ ID NO: 33714 - DNA, 20 bp, Artificial Sequence
  Synthetic
gatggcgtactcgtcggcgt

SEQ ID NO: 33715 - DNA, 20 bp, Artificial Sequence
  Synthetic
tacgccgacgagtacgccat

SEQ ID NO: 33716 - DNA, 20 bp, Artificial Sequence
  Synthetic
gtagccgatggcgtactcgt

SEQ ID NO: 33717 - DNA, 20 bp, Artificial Sequence
  Synthetic
ctgctttttgaagtagccga

SEQ ID NO: 33718 - DNA, 20 bp, Artificial Sequence
  Synthetic
catcggctacttcaaaaagc

SEQ ID NO: 33719 - DNA, 20 bp, Artificial Sequence
  Synthetic
caccccccagggtttctcca

SEQ ID NO: 33720 - DNA, 20 bp, Artificial Sequence
  Synthetic
tgatgtccttggagaaaccc

SEQ ID NO: 33721 - DNA, 20 bp, Artificial Sequence
  Synthetic
gctcaagagcatcctccagc

SEQ ID NO: 33722 - DNA, 20 bp, Artificial Sequence
  Synthetic
gagcatcctccagcaggtga

SEQ ID NO: 33723 - DNA, 20 bp, Artificial Sequence
  Synthetic
catcctccagcaggtgaagg

SEQ ID NO: 33724 - DNA, 20 bp, Artificial Sequence
  Synthetic
atcctccagcaggtgaaggt

SEQ ID NO: 33725 - DNA, 20 bp, Artificial Sequence
  Synthetic
cacccaccttcacctgctgg

SEQ ID NO: 33726 - DNA, 20 bp, Artificial Sequence
  Synthetic
ggacacccaccttcacctgc

SEQ ID NO: 33727 - DNA, 20 bp, Artificial Sequence
  Synthetic
ccaagagccatcaaagcgct

SEQ ID NO: 33728 - DNA, 20 bp, Artificial Sequence
  Synthetic
tgaagggccaagcgctttga

SEQ ID NO: 33729 - DNA, 20 bp, Artificial Sequence
  Synthetic
tcaaagcgcttggcccttca

SEQ ID NO: 33730 - DNA, 20 bp, Artificial Sequence
  Synthetic
ctcttcacaggttccatgaa

SEQ ID NO: 33731 - DNA, 20 bp, Artificial Sequence
  Synthetic
tctcttcacaggttccatga

SEQ ID NO: 33732 - DNA, 20 bp, Artificial Sequence
  Synthetic
ggagcttctgttctcttcac

SEQ ID NO: 33733 - DNA, 20 bp, Artificial Sequence
  Synthetic
gtgaagagaacagaagctcc

SEQ ID NO: 33734 - DNA, 20 bp, Artificial Sequence
  Synthetic
cttataacttcataatatcc

SEQ ID NO: 33735 - DNA, 20 bp, Artificial Sequence
  Synthetic
caggatattatgaagttata

SEQ ID NO: 33736 - DNA, 20 bp, Artificial Sequence
  Synthetic
tgaagttataaggttcccca

SEQ ID NO: 33737 - DNA, 20 bp, Artificial Sequence
  Synthetic
gaagttataaggttccccat

SEQ ID NO: 33738 - DNA, 20 bp, Artificial Sequence
  Synthetic
tgttaatggtattacccatg

SEQ ID NO: 33739 - DNA, 20 bp, Artificial Sequence
  Synthetic
atgttaatggtattacccat

SEQ ID NO: 33740 - DNA, 20 bp, Artificial Sequence
  Synthetic
aatgttaatggtattaccca

SEQ ID NO: 33741 - DNA, 20 bp, Artificial Sequence
  Synthetic
attcttgaggcgttcactca

SEQ ID NO: 33742 - DNA, 20 bp, Artificial Sequence
  Synthetic
tgagtgaacgcctcaagaat

SEQ ID NO: 33743 - DNA, 20 bp, Artificial Sequence
  Synthetic
acacgtagtacctattcttg

SEQ ID NO: 33744 - DNA, 20 bp, Artificial Sequence
  Synthetic
cgtgtctaagaaattattca

SEQ ID NO: 33745 - DNA, 20 bp, Artificial Sequence
  Synthetic
ggggttgtactctttgcaat

SEQ ID NO: 33746 - DNA, 20 bp, Artificial Sequence
  Synthetic
tgtagtattcactctcaggg

SEQ ID NO: 33747 - DNA, 20 bp, Artificial Sequence
  Synthetic
ttgtagtattcactctcagg

SEQ ID NO: 33748 - DNA, 20 bp, Artificial Sequence
  Synthetic
tttgtagtattcactctcag

SEQ ID NO: 33749 - DNA, 20 bp, Artificial Sequence
  Synthetic
atttgtagtattcactctca

SEQ ID NO: 33750 - DNA, 20 bp, Artificial Sequence
  Synthetic
catttgtagtattcactctc

SEQ ID NO: 33751 - DNA, 20 bp, Artificial Sequence
  Synthetic
cgctttcttcacggcgattc

SEQ ID NO: 33752 - DNA, 20 bp, Artificial Sequence
  Synthetic
gcgctttcttcacggcgatt

SEQ ID NO: 33753 - DNA, 20 bp, Artificial Sequence
  Synthetic
gcgtagttgcgctttcttca

SEQ ID NO: 33754 - DNA, 20 bp, Artificial Sequence
  Synthetic
cgcaactacgctccgctccg

SEQ ID NO: 33755 - DNA, 20 bp, Artificial Sequence
  Synthetic
gcaactacgctccgctccgc

SEQ ID NO: 33756 - DNA, 20 bp, Artificial Sequence
  Synthetic
cagtttcttggcccgcggag

SEQ ID NO: 33757 - DNA, 20 bp, Artificial Sequence
  Synthetic
cgctccgcgggccaagaaac

SEQ ID NO: 33758 - DNA, 20 bp, Artificial Sequence
  Synthetic
ttctccagtttcttggcccg

SEQ ID NO: 33759 - DNA, 20 bp, Artificial Sequence
  Synthetic
gccaagaaactggagaaact

SEQ ID NO: 33760 - DNA, 20 bp, Artificial Sequence
  Synthetic
tccgagtttctccagtttct

SEQ ID NO: 33761 - DNA, 20 bp, Artificial Sequence
  Synthetic
cggagtgtactccgcctgca

SEQ ID NO: 33762 - DNA, 20 bp, Artificial Sequence
  Synthetic
gcgagcgcgtaccttgcagg

SEQ ID NO: 33763 - DNA, 20 bp, Artificial Sequence
  Synthetic
gcggcgagcgcgtaccttgc

SEQ ID NO: 33764 - DNA, 20 bp, Artificial Sequence
  Synthetic
tttattccatttttaggccg

SEQ ID NO: 33765 - DNA, 20 bp, Artificial Sequence
  Synthetic
attacatttacaagactcct

SEQ ID NO: 33766 - DNA, 20 bp, Artificial Sequence
  Synthetic
gaggagtcttgtaaatgtaa

SEQ ID NO: 33767 - DNA, 20 bp, Artificial Sequence
  Synthetic
agtcttgtaaatgtaatggc

SEQ ID NO: 33768 - DNA, 20 bp, Artificial Sequence
  Synthetic
ggggagtgggtgaggggtta

SEQ ID NO: 33769 - DNA, 20 bp, Artificial Sequence
  Synthetic
gggggagtgggtgaggggtt

SEQ ID NO: 33770 - DNA, 20 bp, Artificial Sequence
  Synthetic
ctctggggggagtgggtgag

SEQ ID NO: 33771 - DNA, 20 bp, Artificial Sequence
  Synthetic
gctctggggggagtgggtga

SEQ ID NO: 33772 - DNA, 20 bp, Artificial Sequence
  Synthetic
ggctctggggggagtgggtg

SEQ ID NO: 33773 - DNA, 20 bp, Artificial Sequence
  Synthetic
aggtcggctctggggggagt

SEQ ID NO: 33774 - DNA, 20 bp, Artificial Sequence
  Synthetic
caggtcggctctggggggag

SEQ ID NO: 33775 - DNA, 20 bp, Artificial Sequence
  Synthetic
tgctgcaggtcggctctggg

SEQ ID NO: 33776 - DNA, 20 bp, Artificial Sequence
  Synthetic
ttgctgcaggtcggctctgg

SEQ ID NO: 33777 - DNA, 20 bp, Artificial Sequence
  Synthetic
tttgctgcaggtcggctctg

SEQ ID NO: 33778 - DNA, 20 bp, Artificial Sequence
  Synthetic
atttgctgcaggtcggctct

SEQ ID NO: 33779 - DNA, 20 bp, Artificial Sequence
  Synthetic
tatttgctgcaggtcggctc

SEQ ID NO: 33780 - DNA, 20 bp, Artificial Sequence
  Synthetic
gacaattatttgctgcaggt

SEQ ID NO: 33781 - DNA, 20 bp, Artificial Sequence
  Synthetic
gactgacaattatttgctgc

SEQ ID NO: 33782 - DNA, 20 bp, Artificial Sequence
  Synthetic
tcagtctaacagaatcctgt

SEQ ID NO: 33783 - DNA, 20 bp, Artificial Sequence
  Synthetic
ggcatggctacaactccgac

SEQ ID NO: 33784 - DNA, 20 bp, Artificial Sequence
  Synthetic
cggagttgtagccatgccct

SEQ ID NO: 33785 - DNA, 20 bp, Artificial Sequence
  Synthetic
ttaggaactcacctagggca

SEQ ID NO: 33786 - DNA, 20 bp, Artificial Sequence
  Synthetic
aagatttaggaactcaccta

SEQ ID NO: 33787 - DNA, 20 bp, Artificial Sequence
  Synthetic
agctgctcatgtttcccacc

SEQ ID NO: 33788 - DNA, 20 bp, Artificial Sequence
  Synthetic
ctctgacacattctccaggt

SEQ ID NO: 33789 - DNA, 20 bp, Artificial Sequence
  Synthetic
cctctgacacattctccagg

SEQ ID NO: 33790 - DNA, 20 bp, Artificial Sequence
  Synthetic
ccacctggagaatgtgtcag

SEQ ID NO: 33791 - DNA, 20 bp, Artificial Sequence
  Synthetic
cttcctctgacacattctcc

SEQ ID NO: 33792 - DNA, 20 bp, Artificial Sequence
  Synthetic
ggaagaaatgaacagactcc

SEQ ID NO: 33793 - DNA, 20 bp, Artificial Sequence
  Synthetic
gaagaaatgaacagactcct

SEQ ID NO: 33794 - DNA, 20 bp, Artificial Sequence
  Synthetic
cagactcctgggaatagtat

SEQ ID NO: 33795 - DNA, 20 bp, Artificial Sequence
  Synthetic
ccacatccaatactattccc

SEQ ID NO: 33796 - DNA, 20 bp, Artificial Sequence
  Synthetic
cctgggaatagtattggatg

SEQ ID NO: 33797 - DNA, 20 bp, Artificial Sequence
  Synthetic
tctctttacctgtgtccaca

SEQ ID NO: 33798 - DNA, 20 bp, Artificial Sequence
  Synthetic
atcttcttccttgtggacac

SEQ ID NO: 33799 - DNA, 20 bp, Artificial Sequence
  Synthetic
tatctgcatcttcttccttg

SEQ ID NO: 33800 - DNA, 20 bp, Artificial Sequence
  Synthetic
tagatagaaataaacttgtt

SEQ ID NO: 33801 - DNA, 20 bp, Artificial Sequence
  Synthetic
agtttatttctatctattta

SEQ ID NO: 33802 - DNA, 20 bp, Artificial Sequence
  Synthetic
agaaagtctattttacaaag

SEQ ID NO: 33803 - DNA, 20 bp, Artificial Sequence
  Synthetic
tttacaaagaggaaaacctg

SEQ ID NO: 33804 - DNA, 20 bp, Artificial Sequence
  Synthetic
agaggaaaacctgtggttga

SEQ ID NO: 33805 - DNA, 20 bp, Artificial Sequence
  Synthetic
acctgtggttgaaggctctt

SEQ ID NO: 33806 - DNA, 20 bp, Artificial Sequence
  Synthetic
tccaaagagccttcaaccac

SEQ ID NO: 33807 - DNA, 20 bp, Artificial Sequence
  Synthetic
atgctaggtttttcaaatgg

SEQ ID NO: 33808 - DNA, 20 bp, Artificial Sequence
  Synthetic
aatgctaggtttttcaaatg

SEQ ID NO: 33809 - DNA, 20 bp, Artificial Sequence
  Synthetic
caatgctaggtttttcaaat

SEQ ID NO: 33810 - DNA, 20 bp, Artificial Sequence
  Synthetic
tcaatgctaggtttttcaaa

SEQ ID NO: 33811 - DNA, 20 bp, Artificial Sequence
  Synthetic
tgaaaaacctagcattgaac

SEQ ID NO: 33812 - DNA, 20 bp, Artificial Sequence
  Synthetic
ctttttacctgttcaatgct

SEQ ID NO: 33813 - DNA, 20 bp, Artificial Sequence
  Synthetic
gtcacctgccagcaaaagaa

SEQ ID NO: 33814 - DNA, 20 bp, Artificial Sequence
  Synthetic
tttgcctttcttttgctggc

SEQ ID NO: 33815 - DNA, 20 bp, Artificial Sequence
  Synthetic
attgtttgcctttcttttgc

SEQ ID NO: 33816 - DNA, 20 bp, Artificial Sequence
  Synthetic
aaggcaaacaatagttgagt

SEQ ID NO: 33817 - DNA, 20 bp, Artificial Sequence
  Synthetic
tcctaaaccgcatcaactat

SEQ ID NO: 33818 - DNA, 20 bp, Artificial Sequence
  Synthetic
gccaatagttgatgcggttt

SEQ ID NO: 33819 - DNA, 20 bp, Artificial Sequence
  Synthetic
ccagatgccaatagttgatg

SEQ ID NO: 33820 - DNA, 20 bp, Artificial Sequence
  Synthetic
ccgcatcaactattggcatc

SEQ ID NO: 33821 - DNA, 20 bp, Artificial Sequence
  Synthetic
catcaactattggcatctgg

SEQ ID NO: 33822 - DNA, 20 bp, Artificial Sequence
  Synthetic
gatcgcagtcttcgttgaga

SEQ ID NO: 33823 - DNA, 20 bp, Artificial Sequence
  Synthetic
tctcccaatgatgatatttc

SEQ ID NO: 33824 - DNA, 20 bp, Artificial Sequence
  Synthetic
tatccagaaatatcatcatt

SEQ ID NO: 33825 - DNA, 20 bp, Artificial Sequence
  Synthetic
gtatccagaaatatcatcat

SEQ ID NO: 33826 - DNA, 20 bp, Artificial Sequence
  Synthetic
gatacaaagagaactacaca

SEQ ID NO: 33827 - DNA, 20 bp, Artificial Sequence
  Synthetic
ggtagactgtcgcagaactg

SEQ ID NO: 33828 - DNA, 20 bp, Artificial Sequence
  Synthetic
agttctgcgacagtctacct

SEQ ID NO: 33829 - DNA, 20 bp, Artificial Sequence
  Synthetic
acctcggtacgaaaccacac

SEQ ID NO: 33830 - DNA, 20 bp, Artificial Sequence
  Synthetic
acctgtgtggtttcgtaccg

SEQ ID NO: 33831 - DNA, 20 bp, Artificial Sequence
  Synthetic
tacgaaaccacacaggtgtt

SEQ ID NO: 33832 - DNA, 20 bp, Artificial Sequence
  Synthetic
acgaaaccacacaggtgttt

SEQ ID NO: 33833 - DNA, 20 bp, Artificial Sequence
  Synthetic
tgttctcccaaacacctgtg

SEQ ID NO: 33834 - DNA, 20 bp, Artificial Sequence
  Synthetic
tgggagaacattgcttcgct

SEQ ID NO: 33835 - DNA, 20 bp, Artificial Sequence
  Synthetic
gctcggtcttcactgttatg

SEQ ID NO: 33836 - DNA, 20 bp, Artificial Sequence
  Synthetic
tgttatgaggcgacaactcc

SEQ ID NO: 33837 - DNA, 20 bp, Artificial Sequence
  Synthetic
tttcctgtcttgcttgttcc

SEQ ID NO: 33838 - DNA, 20 bp, Artificial Sequence
  Synthetic
acccttgctttaattaaaga

SEQ ID NO: 33839 - DNA, 20 bp, Artificial Sequence
  Synthetic
gccatctttaattaaagcaa

SEQ ID NO: 33840 - DNA, 20 bp, Artificial Sequence
  Synthetic
ggccatctttaattaaagca

SEQ ID NO: 33841 - DNA, 20 bp, Artificial Sequence
  Synthetic
attaaagatggccgtgttat

SEQ ID NO: 33842 - DNA, 20 bp, Artificial Sequence
  Synthetic
aaagatggccgtgttattgg

SEQ ID NO: 33843 - DNA, 20 bp, Artificial Sequence
  Synthetic
aacagataccaccaataaca

SEQ ID NO: 33844 - DNA, 20 bp, Artificial Sequence
  Synthetic
ttccgtatgttcccatctca

SEQ ID NO: 33845 - DNA, 20 bp, Artificial Sequence
  Synthetic
atccttgagatgggaacata

SEQ ID NO: 33846 - DNA, 20 bp, Artificial Sequence
  Synthetic
tctctgtgaatccttgagat

SEQ ID NO: 33847 - DNA, 20 bp, Artificial Sequence
  Synthetic
atctctgtgaatccttgaga

SEQ ID NO: 33848 - DNA, 20 bp, Artificial Sequence
  Synthetic
aacctcaaatgagcaagtca

SEQ ID NO: 33849 - DNA, 20 bp, Artificial Sequence
  Synthetic
taccttgacttgctcatttg

SEQ ID NO: 33850 - DNA, 20 bp, Artificial Sequence
  Synthetic
ctaacttccacacagggcta

SEQ ID NO: 33851 - DNA, 20 bp, Artificial Sequence
  Synthetic
attctttcaaatgattcatc

SEQ ID NO: 33852 - DNA, 20 bp, Artificial Sequence
  Synthetic
ctgcatatgtgaggaagttc

SEQ ID NO: 33853 - DNA, 20 bp, Artificial Sequence
  Synthetic
catattcatctgcatatgtg

SEQ ID NO: 33854 - DNA, 20 bp, Artificial Sequence
  Synthetic
tatgcagatgaatatgcaat

SEQ ID NO: 33855 - DNA, 20 bp, Artificial Sequence
  Synthetic
aattggatactttaagaaac

SEQ ID NO: 33856 - DNA, 20 bp, Artificial Sequence
  Synthetic
ggatactttaagaaacaggt

SEQ ID NO: 33857 - DNA, 20 bp, Artificial Sequence
  Synthetic
tgtgacctacgacatcctcc

SEQ ID NO: 33858 - DNA, 20 bp, Artificial Sequence
  Synthetic
cattgcctggaggatgtcgt

SEQ ID NO: 33859 - DNA, 20 bp, Artificial Sequence
  Synthetic
cggtaaatctcattgcctgg

SEQ ID NO: 33860 - DNA, 20 bp, Artificial Sequence
  Synthetic
ttgcggtaaatctcattgcc

SEQ ID NO: 33861 - DNA, 20 bp, Artificial Sequence
  Synthetic
aggcaatgagatttaccgca

SEQ ID NO: 33862 - DNA, 20 bp, Artificial Sequence
  Synthetic
ggcaatgagatttaccgcaa

SEQ ID NO: 33863 - DNA, 20 bp, Artificial Sequence
  Synthetic
agaaggagatggtgcccttg

SEQ ID NO: 33864 - DNA, 20 bp, Artificial Sequence
  Synthetic
atcaatctcaaagaaggaga

SEQ ID NO: 33865 - DNA, 20 bp, Artificial Sequence
  Synthetic
atctccttctttgagattga

SEQ ID NO: 33866 - DNA, 20 bp, Artificial Sequence
  Synthetic
acgtccatcaatctcaaaga

SEQ ID NO: 33867 - DNA, 20 bp, Artificial Sequence
  Synthetic
gattgatggacgtaagaaca

SEQ ID NO: 33868 - DNA, 20 bp, Artificial Sequence
  Synthetic
ttcccagaacctgtgtcttt

SEQ ID NO: 33869 - DNA, 20 bp, Artificial Sequence
  Synthetic
ggccaaaagacacaggttct

SEQ ID NO: 33870 - DNA, 20 bp, Artificial Sequence
  Synthetic
tggccaaaagacacaggttc

SEQ ID NO: 33871 - DNA, 20 bp, Artificial Sequence
  Synthetic
aacacttggccaaaagacac

SEQ ID NO: 33872 - DNA, 20 bp, Artificial Sequence
  Synthetic
cttatggtcaaggaaacact

SEQ ID NO: 33873 - DNA, 20 bp, Artificial Sequence
  Synthetic
agtacagtgtcttatggtca

SEQ ID NO: 33874 - DNA, 20 bp, Artificial Sequence
  Synthetic
tgtcatagtacagtgtctta

SEQ ID NO: 33875 - DNA, 20 bp, Artificial Sequence
  Synthetic
tcatgacgtagaagaggaaa

SEQ ID NO: 33876 - DNA, 20 bp, Artificial Sequence
  Synthetic
gtcatgacgtagaagaggaa

SEQ ID NO: 33877 - DNA, 20 bp, Artificial Sequence
  Synthetic
actctgtcatgacgtagaag

SEQ ID NO: 33878 - DNA, 20 bp, Artificial Sequence
  Synthetic
catgacagagtatgactgta

SEQ ID NO: 33879 - DNA, 20 bp, Artificial Sequence
  Synthetic
atgacagagtatgactgtaa

SEQ ID NO: 33880 - DNA, 20 bp, Artificial Sequence
  Synthetic
ctgtaagggcttccacatcg

SEQ ID NO: 33881 - DNA, 20 bp, Artificial Sequence
  Synthetic
tgtaagggcttccacatcgt

SEQ ID NO: 33882 - DNA, 20 bp, Artificial Sequence
  Synthetic
tggagaagtagcccacgatg

SEQ ID NO: 33883 - DNA, 20 bp, Artificial Sequence
  Synthetic
catcgtgggctacttctcca

SEQ ID NO: 33884 - DNA, 20 bp, Artificial Sequence
  Synthetic
tctccaggagaaagaatcaa

SEQ ID NO: 33885 - DNA, 20 bp, Artificial Sequence
  Synthetic
cttccgttgattctttctcc

SEQ ID NO: 33886 - DNA, 20 bp, Artificial Sequence
  Synthetic
atcaacggaagactacaatg

SEQ ID NO: 33887 - DNA, 20 bp, Artificial Sequence
  Synthetic
gggaggcagggttaggatgc

SEQ ID NO: 33888 - DNA, 20 bp, Artificial Sequence
  Synthetic
gctggtagggaggcagggtt

SEQ ID NO: 33889 - DNA, 20 bp, Artificial Sequence
  Synthetic
ccggcgctggtagggaggca

SEQ ID NO: 33890 - DNA, 20 bp, Artificial Sequence
  Synthetic
ccctgcctccctaccagcgc

SEQ ID NO: 33891 - DNA, 20 bp, Artificial Sequence
  Synthetic
cccggcgctggtagggaggc

SEQ ID NO: 33892 - DNA, 20 bp, Artificial Sequence
  Synthetic
cctgcctccctaccagcgcc

SEQ ID NO: 33893 - DNA, 20 bp, Artificial Sequence
  Synthetic
ctgcctccctaccagcgccg

SEQ ID NO: 33894 - DNA, 20 bp, Artificial Sequence
  Synthetic
tagccccggcgctggtaggg

SEQ ID NO: 33895 - DNA, 20 bp, Artificial Sequence
  Synthetic
ccgtagccccggcgctggta

SEQ ID NO: 33896 - DNA, 20 bp, Artificial Sequence
  Synthetic
ccctaccagcgccggggcta

SEQ ID NO: 33897 - DNA, 20 bp, Artificial Sequence
  Synthetic
gccgtagccccggcgctggt

SEQ ID NO: 33898 - DNA, 20 bp, Artificial Sequence
  Synthetic
gcttgccgtagccccggcgc

SEQ ID NO: 33899 - DNA, 20 bp, Artificial Sequence
  Synthetic
tcagcagcttgccgtagccc

SEQ ID NO: 33900 - DNA, 20 bp, Artificial Sequence
  Synthetic
aggctatgaactctccaaag

SEQ ID NO: 33901 - DNA, 20 bp, Artificial Sequence
  Synthetic
tatgaactctccaaagtgga

SEQ ID NO: 33902 - DNA, 20 bp, Artificial Sequence
  Synthetic
atgaactctccaaagtggaa

SEQ ID NO: 33903 - DNA, 20 bp, Artificial Sequence
  Synthetic
tccaaagtggaagggaaaac

SEQ ID NO: 33904 - DNA, 20 bp, Artificial Sequence
  Synthetic
ccctgttttcccttccactt

SEQ ID NO: 33905 - DNA, 20 bp, Artificial Sequence
  Synthetic
ccaaagtggaagggaaaaca

SEQ ID NO: 33906 - DNA, 20 bp, Artificial Sequence
  Synthetic
gtctgagaggggcttctcag

SEQ ID NO: 33907 - DNA, 20 bp, Artificial Sequence
  Synthetic
ggtctgagaggggcttctca

SEQ ID NO: 33908 - DNA, 20 bp, Artificial Sequence
  Synthetic
aggtctgagaggggcttctc

SEQ ID NO: 33909 - DNA, 20 bp, Artificial Sequence
  Synthetic
gagaagcccctctcagacct

SEQ ID NO: 33910 - DNA, 20 bp, Artificial Sequence
  Synthetic
aggaggccaaggtctgagag

SEQ ID NO: 33911 - DNA, 20 bp, Artificial Sequence
  Synthetic
taggaggccaaggtctgaga

SEQ ID NO: 33912 - DNA, 20 bp, Artificial Sequence
  Synthetic
ataggaggccaaggtctgag

SEQ ID NO: 33913 - DNA, 20 bp, Artificial Sequence
  Synthetic
ttcgataggataggaggcca

SEQ ID NO: 33914 - DNA, 20 bp, Artificial Sequence
  Synthetic
agtagcttcgataggatagg

SEQ ID NO: 33915 - DNA, 20 bp, Artificial Sequence
  Synthetic
tcctatcctatcgaagctac

SEQ ID NO: 33916 - DNA, 20 bp, Artificial Sequence
  Synthetic
accagtagcttcgataggat

SEQ ID NO: 33917 - DNA, 20 bp, Artificial Sequence
  Synthetic
ctgggaccagtagcttcgat

SEQ ID NO: 33918 - DNA, 20 bp, Artificial Sequence
  Synthetic
ctactggtcccagaccatcc

SEQ ID NO: 33919 - DNA, 20 bp, Artificial Sequence
  Synthetic
caggatctccaggatggtct

SEQ ID NO: 33920 - DNA, 20 bp, Artificial Sequence
  Synthetic
tcaggatctccaggatggtc

SEQ ID NO: 33921 - DNA, 20 bp, Artificial Sequence
  Synthetic
gaccatcctggagatcctga

SEQ ID NO: 33922 - DNA, 20 bp, Artificial Sequence
  Synthetic
accatcctggagatcctgat

SEQ ID NO: 33923 - DNA, 20 bp, Artificial Sequence
  Synthetic
ccccatcaggatctccagga

SEQ ID NO: 33924 - DNA, 20 bp, Artificial Sequence
  Synthetic
ccatcctggagatcctgatg

SEQ ID NO: 33925 - DNA, 20 bp, Artificial Sequence
  Synthetic
tcagccccatcaggatctcc

SEQ ID NO: 33926 - DNA, 20 bp, Artificial Sequence
  Synthetic
gatcctgatggggctgaagt

SEQ ID NO: 33927 - DNA, 20 bp, Artificial Sequence
  Synthetic
tctccgacttcagccccatc

SEQ ID NO: 33928 - DNA, 20 bp, Artificial Sequence
  Synthetic
atggggctgaagtcggagag

SEQ ID NO: 33929 - DNA, 20 bp, Artificial Sequence
  Synthetic
tggggctgaagtcggagagc

SEQ ID NO: 33930 - DNA, 20 bp, Artificial Sequence
  Synthetic
ggggctgaagtcggagagcg

SEQ ID NO: 33931 - DNA, 20 bp, Artificial Sequence
  Synthetic
tgaagtcggagagcggggag

SEQ ID NO: 33932 - DNA, 20 bp, Artificial Sequence
  Synthetic
gctcacttgatggtgatctg

SEQ ID NO: 33933 - DNA, 20 bp, Artificial Sequence
  Synthetic
acagcgccaggctcacttga

SEQ ID NO: 33934 - DNA, 20 bp, Artificial Sequence
  Synthetic
tgaaatcaccagcatcaaga

SEQ ID NO: 33935 - DNA, 20 bp, Artificial Sequence
  Synthetic
aatcaccagcatcaagaagg

SEQ ID NO: 33936 - DNA, 20 bp, Artificial Sequence
  Synthetic
gacatcctccttcttgatgc

SEQ ID NO: 33937 - DNA, 20 bp, Artificial Sequence
  Synthetic
gagattgaggtactgcagag

SEQ ID NO: 33938 - DNA, 20 bp, Artificial Sequence
  Synthetic
tgtagtagttgatgagattg

SEQ ID NO: 33939 - DNA, 20 bp, Artificial Sequence
  Synthetic
caatctcatcaactactaca

SEQ ID NO: 33940 - DNA, 20 bp, Artificial Sequence
  Synthetic
ctcatcaactactacaaggt

SEQ ID NO: 33941 - DNA, 20 bp, Artificial Sequence
  Synthetic
gtgtgaggatgtactggccc

SEQ ID NO: 33942 - DNA, 20 bp, Artificial Sequence
  Synthetic
ctgacagtgtgaggatgtac

SEQ ID NO: 33943 - DNA, 20 bp, Artificial Sequence
  Synthetic
cgatgtcctctgacagtgtg

SEQ ID NO: 33944 - DNA, 20 bp, Artificial Sequence
  Synthetic
tccccagggggagataatcg

SEQ ID NO: 33945 - DNA, 20 bp, Artificial Sequence
  Synthetic
ccccagggggagataatcga

SEQ ID NO: 33946 - DNA, 20 bp, Artificial Sequence
  Synthetic
gctgccgcctacccgtgctg

SEQ ID NO: 33947 - DNA, 20 bp, Artificial Sequence
  Synthetic
gccgcctacccgtgctgcgg

SEQ ID NO: 33948 - DNA, 20 bp, Artificial Sequence
  Synthetic
tccgccgcagcacgggtagg

SEQ ID NO: 33949 - DNA, 20 bp, Artificial Sequence
  Synthetic
ggttccgccgcagcacgggt

SEQ ID NO: 33950 - DNA, 20 bp, Artificial Sequence
  Synthetic
acccgtgctgcggcggaacc

SEQ ID NO: 33951 - DNA, 20 bp, Artificial Sequence
  Synthetic
tcctggttccgccgcagcac

SEQ ID NO: 33952 - DNA, 20 bp, Artificial Sequence
  Synthetic
gtcctggttccgccgcagca

SEQ ID NO: 33953 - DNA, 20 bp, Artificial Sequence
  Synthetic
accaggacaacgaagatgag

SEQ ID NO: 33954 - DNA, 20 bp, Artificial Sequence
  Synthetic
gccactcatcttcgttgtcc

SEQ ID NO: 33955 - DNA, 20 bp, Artificial Sequence
  Synthetic
cacgctcaggatctcggcca

SEQ ID NO: 33956 - DNA, 20 bp, Artificial Sequence
  Synthetic
tcacgctcaggatctcggcc

SEQ ID NO: 33957 - DNA, 20 bp, Artificial Sequence
  Synthetic
ggccgagatcctgagcgtga

SEQ ID NO: 33958 - DNA, 20 bp, Artificial Sequence
  Synthetic
gtccttcacgctcaggatct

SEQ ID NO: 33959 - DNA, 20 bp, Artificial Sequence
  Synthetic
cactgatgtccttcacgctc

SEQ ID NO: 33960 - DNA, 20 bp, Artificial Sequence
  Synthetic
ctgagcgtgaaggacatcag

SEQ ID NO: 33961 - DNA, 20 bp, Artificial Sequence
  Synthetic
gcgtgaaggacatcagtggc

SEQ ID NO: 33962 - DNA, 20 bp, Artificial Sequence
  Synthetic
aatggacgtagaaaagcttc

SEQ ID NO: 33963 - DNA, 20 bp, Artificial Sequence
  Synthetic
agaactcacagtcaatgtaa

SEQ ID NO: 33964 - DNA, 20 bp, Artificial Sequence
  Synthetic
tgctacagtcaacaaacgtc

SEQ ID NO: 33965 - DNA, 20 bp, Artificial Sequence
  Synthetic
tcaacaaacgtctggatgaa

SEQ ID NO: 33966 - DNA, 20 bp, Artificial Sequence
  Synthetic
caacaaacgtctggatgaat

SEQ ID NO: 33967 - DNA, 20 bp, Artificial Sequence
  Synthetic
atgaatgggtgacgcatgag

SEQ ID NO: 33968 - DNA, 20 bp, Artificial Sequence
  Synthetic
atgggtgacgcatgagcggc

SEQ ID NO: 33969 - DNA, 20 bp, Artificial Sequence
  Synthetic
tgcagctcctgtcgagatca

SEQ ID NO: 33970 - DNA, 20 bp, Artificial Sequence
  Synthetic
atttttgccttgatctcgac

SEQ ID NO: 33971 - DNA, 20 bp, Artificial Sequence
  Synthetic
tcgagatcaaggcaaaaatg

SEQ ID NO: 33972 - DNA, 20 bp, Artificial Sequence
  Synthetic
ttttgtgattcatgtgaccg

SEQ ID NO: 33973 - DNA, 20 bp, Artificial Sequence
  Synthetic
atgtgaccgaggttttcaca

SEQ ID NO: 33974 - DNA, 20 bp, Artificial Sequence
  Synthetic
aacactccatgtgaaaacct

SEQ ID NO: 33975 - DNA, 20 bp, Artificial Sequence
  Synthetic
tttggcatacgggtgagtgg

SEQ ID NO: 33976 - DNA, 20 bp, Artificial Sequence
  Synthetic
ccttttggcatacgggtgag

SEQ ID NO: 33977 - DNA, 20 bp, Artificial Sequence
  Synthetic
ccactcacccgtatgccaaa

SEQ ID NO: 33978 - DNA, 20 bp, Artificial Sequence
  Synthetic
tttctcaccttttggcatac

SEQ ID NO: 33979 - DNA, 20 bp, Artificial Sequence
  Synthetic
atttctcaccttttggcata

SEQ ID NO: 33980 - DNA, 20 bp, Artificial Sequence
  Synthetic
agaaagtatttctcaccttt

SEQ ID NO: 33981 - DNA, 20 bp, Artificial Sequence
  Synthetic
tttatttttttataggcatg

SEQ ID NO: 33982 - DNA, 20 bp, Artificial Sequence
  Synthetic
tatgtcaaatatgtcgacct

SEQ ID NO: 33983 - DNA, 20 bp, Artificial Sequence
  Synthetic
aaatctcattggcaggagga

SEQ ID NO: 33984 - DNA, 20 bp, Artificial Sequence
  Synthetic
ctgtaaatctcattggcagg

SEQ ID NO: 33985 - DNA, 20 bp, Artificial Sequence
  Synthetic
tttctgtaaatctcattggc

SEQ ID NO: 33986 - DNA, 20 bp, Artificial Sequence
  Synthetic
attctttctgtaaatctcat

SEQ ID NO: 33987 - DNA, 20 bp, Artificial Sequence
  Synthetic
gaataatatttctgtctttg

SEQ ID NO: 33988 - DNA, 20 bp, Artificial Sequence
  Synthetic
tgtttatttctctaggttga

SEQ ID NO: 33989 - DNA, 20 bp, Artificial Sequence
  Synthetic
gtttatttctctaggttgat

SEQ ID NO: 33990 - DNA, 20 bp, Artificial Sequence
  Synthetic
acacaggttttgacaataaa

SEQ ID NO: 33991 - DNA, 20 bp, Artificial Sequence
  Synthetic
ttgtcaaaacctgtgtcttt

SEQ ID NO: 33992 - DNA, 20 bp, Artificial Sequence
  Synthetic
acaactttgccaaaagacac

SEQ ID NO: 33993 - DNA, 20 bp, Artificial Sequence
  Synthetic
catcgtaatagagggttttg

SEQ ID NO: 33994 - DNA, 20 bp, Artificial Sequence
  Synthetic
caaaaccctctattacgatg

SEQ ID NO: 33995 - DNA, 20 bp, Artificial Sequence
  Synthetic
tggctccacatcgtaataga

SEQ ID NO: 33996 - DNA, 20 bp, Artificial Sequence
  Synthetic
atggctccacatcgtaatag

SEQ ID NO: 33997 - DNA, 20 bp, Artificial Sequence
  Synthetic
gttagtacataaaaaagaaa

SEQ ID NO: 33998 - DNA, 20 bp, Artificial Sequence
  Synthetic
actaacacagaatgatgtca

SEQ ID NO: 33999 - DNA, 20 bp, Artificial Sequence
  Synthetic
ctaacacagaatgatgtcaa

SEQ ID NO: 34000 - DNA, 20 bp, Artificial Sequence
  Synthetic
gtcaagggctgccaccttgt

SEQ ID NO: 34001 - DNA, 20 bp, Artificial Sequence
  Synthetic
tagaaaagtagccaacaagg

SEQ ID NO: 34002 - DNA, 20 bp, Artificial Sequence
  Synthetic
ccttagaaaagtagccaaca

SEQ ID NO: 34003 - DNA, 20 bp, Artificial Sequence
  Synthetic
ccttgttggctacttttcta

SEQ ID NO: 34004 - DNA, 20 bp, Artificial Sequence
  Synthetic
tctgttggcagtgcttttcc

SEQ ID NO: 34005 - DNA, 20 bp, Artificial Sequence
  Synthetic
aggaaacattgtacttctgt

SEQ ID NO: 34006 - DNA, 20 bp, Artificial Sequence
  Synthetic
ttgaggaagaatcattatac

SEQ ID NO: 34007 - DNA, 20 bp, Artificial Sequence
  Synthetic
tcttcctcaataccagcgta

SEQ ID NO: 34008 - DNA, 20 bp, Artificial Sequence
  Synthetic
cttcctcaataccagcgtaa

SEQ ID NO: 34009 - DNA, 20 bp, Artificial Sequence
  Synthetic
tagcccttacgctggtattg

SEQ ID NO: 34010 - DNA, 20 bp, Artificial Sequence
  Synthetic
caataccagcgtaagggcta

SEQ ID NO: 34011 - DNA, 20 bp, Artificial Sequence
  Synthetic
accagcgtaagggctatggc

SEQ ID NO: 34012 - DNA, 20 bp, Artificial Sequence
  Synthetic
acctgccatagcccttacgc

SEQ ID NO: 34013 - DNA, 20 bp, Artificial Sequence
  Synthetic
tatttgttatcaaagcgtga

SEQ ID NO: 34014 - DNA, 20 bp, Artificial Sequence
  Synthetic
tcaaagcgtgaaggccaagc

SEQ ID NO: 34015 - DNA, 20 bp, Artificial Sequence
  Synthetic
caaagcgtgaaggccaagca

SEQ ID NO: 34016 - DNA, 20 bp, Artificial Sequence
  Synthetic
gtttctctggagaccctgct

SEQ ID NO: 34017 - DNA, 20 bp, Artificial Sequence
  Synthetic
agatcagataacggtttctc

SEQ ID NO: 34018 - DNA, 20 bp, Artificial Sequence
  Synthetic
agagaaaccgttatctgatc

SEQ ID NO: 34019 - DNA, 20 bp, Artificial Sequence
  Synthetic
gagaaaccgttatctgatct

SEQ ID NO: 34020 - DNA, 20 bp, Artificial Sequence
  Synthetic
agacgacccagatcagataa

SEQ ID NO: 34021 - DNA, 20 bp, Artificial Sequence
  Synthetic
tctgggtcgtctttcctaca

SEQ ID NO: 34022 - DNA, 20 bp, Artificial Sequence
  Synthetic
gtctttcctacatggcatat

SEQ ID NO: 34023 - DNA, 20 bp, Artificial Sequence
  Synthetic
acttttccaatatgccatgt

SEQ ID NO: 34024 - DNA, 20 bp, Artificial Sequence
  Synthetic
atattggaaaagtgtaatat

SEQ ID NO: 34025 - DNA, 20 bp, Artificial Sequence
  Synthetic
gcttgtcattttggtgataa

SEQ ID NO: 34026 - DNA, 20 bp, Artificial Sequence
  Synthetic
tgctgatctgcttgtcattt

SEQ ID NO: 34027 - DNA, 20 bp, Artificial Sequence
  Synthetic
aagaagttaagcaagttgac

SEQ ID NO: 34028 - DNA, 20 bp, Artificial Sequence
  Synthetic
gtgtggaagtgatgtcttga

SEQ ID NO: 34029 - DNA, 20 bp, Artificial Sequence
  Synthetic
agtgtggaagtgatgtcttg

SEQ ID NO: 34030 - DNA, 20 bp, Artificial Sequence
  Synthetic
cattcgtaggtggtggagtg

SEQ ID NO: 34031 - DNA, 20 bp, Artificial Sequence
  Synthetic
actccaccacctacgaatgc

SEQ ID NO: 34032 - DNA, 20 bp, Artificial Sequence
  Synthetic
agtccagcattcgtaggtgg

SEQ ID NO: 34033 - DNA, 20 bp, Artificial Sequence
  Synthetic
ggaagtccagcattcgtagg

SEQ ID NO: 34034 - DNA, 20 bp, Artificial Sequence
  Synthetic
tacggaagtccagcattcgt

SEQ ID NO: 34035 - DNA, 20 bp, Artificial Sequence
  Synthetic
gtgatactcactggtcacta

SEQ ID NO: 34036 - DNA, 20 bp, Artificial Sequence
  Synthetic
ccggcggataatcacaaatc

SEQ ID NO: 34037 - DNA, 20 bp, Artificial Sequence
  Synthetic
tgcagtgcctgtagagtcca

SEQ ID NO: 34038 - DNA, 20 bp, Artificial Sequence
  Synthetic
atttctgccttggactctac

SEQ ID NO: 34039 - DNA, 20 bp, Artificial Sequence
  Synthetic
tacttacagcatttctgcct

SEQ ID NO: 34040 - DNA, 20 bp, Artificial Sequence
  Synthetic
ttttgtgattcctgtgatag

SEQ ID NO: 34041 - DNA, 20 bp, Artificial Sequence
  Synthetic
catatgaaatcctctatcac

SEQ ID NO: 34042 - DNA, 20 bp, Artificial Sequence
  Synthetic
ctgtgatagaggatttcata

SEQ ID NO: 34043 - DNA, 20 bp, Artificial Sequence
  Synthetic
ttggcattctggaaagtggt

SEQ ID NO: 34044 - DNA, 20 bp, Artificial Sequence
  Synthetic
tttggcattctggaaagtgg

SEQ ID NO: 34045 - DNA, 20 bp, Artificial Sequence
  Synthetic
ccttttggcattctggaaag

SEQ ID NO: 34046 - DNA, 20 bp, Artificial Sequence
  Synthetic
ccactttccagaatgccaaa

SEQ ID NO: 34047 - DNA, 20 bp, Artificial Sequence
  Synthetic
aagttcaccttttggcattc

SEQ ID NO: 34048 - DNA, 20 bp, Artificial Sequence
  Synthetic
cagtttagaagttcaccttt

SEQ ID NO: 34049 - DNA, 20 bp, Artificial Sequence
  Synthetic
tatatattaattcagggatg

SEQ ID NO: 34050 - DNA, 20 bp, Artificial Sequence
  Synthetic
ttttctttggtctgcagact

SEQ ID NO: 34051 - DNA, 20 bp, Artificial Sequence
  Synthetic
agttttcttccctttttctt

SEQ ID NO: 34052 - DNA, 20 bp, Artificial Sequence
  Synthetic
cggtaaatttcatttgctgg

SEQ ID NO: 34053 - DNA, 20 bp, Artificial Sequence
  Synthetic
cttcggtaaatttcatttgc

SEQ ID NO: 34054 - DNA, 20 bp, Artificial Sequence
  Synthetic
cagcaaatgaaatttaccga

SEQ ID NO: 34055 - DNA, 20 bp, Artificial Sequence
  Synthetic
atactgaaaggtctttcctt

SEQ ID NO: 34056 - DNA, 20 bp, Artificial Sequence
  Synthetic
gaaagacctttcagtatttg

SEQ ID NO: 34057 - DNA, 20 bp, Artificial Sequence
  Synthetic
cgcttacctcaaatactgaa

SEQ ID NO: 34058 - DNA, 20 bp, Artificial Sequence
  Synthetic
gtttctttttgctaggttga

SEQ ID NO: 34059 - DNA, 20 bp, Artificial Sequence
  Synthetic
tttctttttgctaggttgat

SEQ ID NO: 34060 - DNA, 20 bp, Artificial Sequence
  Synthetic
tggctaacaagcaaaggttt

SEQ ID NO: 34061 - DNA, 20 bp, Artificial Sequence
  Synthetic
agagcttggctaacaagcaa

SEQ ID NO: 34062 - DNA, 20 bp, Artificial Sequence
  Synthetic
cttgttagccaagctcttcc

SEQ ID NO: 34063 - DNA, 20 bp, Artificial Sequence
  Synthetic
tttgtggtccaggaagagct

SEQ ID NO: 34064 - DNA, 20 bp, Artificial Sequence
  Synthetic
aatacaacgttttgtggtcc

SEQ ID NO: 34065 - DNA, 20 bp, Artificial Sequence
  Synthetic
catcataatacaacgttttg

SEQ ID NO: 34066 - DNA, 20 bp, Artificial Sequence
  Synthetic
gtaaggacataaaaaaggaa

SEQ ID NO: 34067 - DNA, 20 bp, Artificial Sequence
  Synthetic
tttttgtaaggacataaaaa

SEQ ID NO: 34068 - DNA, 20 bp, Artificial Sequence
  Synthetic
ccttttcatcattttttgta

SEQ ID NO: 34069 - DNA, 20 bp, Artificial Sequence
  Synthetic
ccttacaaaaaatgatgaaa

SEQ ID NO: 34070 - DNA, 20 bp, Artificial Sequence
  Synthetic
cttacaaaaaatgatgaaaa

SEQ ID NO: 34071 - DNA, 20 bp, Artificial Sequence
  Synthetic
tgatgaaaagggctgtcatc

SEQ ID NO: 34072 - DNA, 20 bp, Artificial Sequence
  Synthetic
gaaaagggctgtcatctggt

SEQ ID NO: 34073 - DNA, 20 bp, Artificial Sequence
  Synthetic
tctggttggatacttctcta

SEQ ID NO: 34074 - DNA, 20 bp, Artificial Sequence
  Synthetic
aggagacattatacttctgc

SEQ ID NO: 34075 - DNA, 20 bp, Artificial Sequence
  Synthetic
ctggggcatgatcattatgc

SEQ ID NO: 34076 - DNA, 20 bp, Artificial Sequence
  Synthetic
tgatcatgccccagcaccaa

SEQ ID NO: 34077 - DNA, 20 bp, Artificial Sequence
  Synthetic
atgccccagcaccaaaggca

SEQ ID NO: 34078 - DNA, 20 bp, Artificial Sequence
  Synthetic
aatccttgcctttggtgctg

SEQ ID NO: 34079 - DNA, 20 bp, Artificial Sequence
  Synthetic
aaatccttgcctttggtgct

SEQ ID NO: 34080 - DNA, 20 bp, Artificial Sequence
  Synthetic
caaatccttgcctttggtgc

SEQ ID NO: 34081 - DNA, 20 bp, Artificial Sequence
  Synthetic
cagcaccaaaggcaaggatt

SEQ ID NO: 34082 - DNA, 20 bp, Artificial Sequence
  Synthetic
accaaaggcaaggatttgga

SEQ ID NO: 34083 - DNA, 20 bp, Artificial Sequence
  Synthetic
accgtccaaatccttgcctt

SEQ ID NO: 34084 - DNA, 20 bp, Artificial Sequence
  Synthetic
tatttgctttctagaagaga

SEQ ID NO: 34085 - DNA, 20 bp, Artificial Sequence
  Synthetic
tctagaagagaaggccaagc

SEQ ID NO: 34086 - DNA, 20 bp, Artificial Sequence
  Synthetic
ctagaagagaaggccaagca

SEQ ID NO: 34087 - DNA, 20 bp, Artificial Sequence
  Synthetic
gcttttcaggagaccctgct

SEQ ID NO: 34088 - DNA, 20 bp, Artificial Sequence
  Synthetic
agatcggagagaggcttttc

SEQ ID NO: 34089 - DNA, 20 bp, Artificial Sequence
  Synthetic
tgaaaagcctctctccgatc

SEQ ID NO: 34090 - DNA, 20 bp, Artificial Sequence
  Synthetic
gaaaagcctctctccgatct

SEQ ID NO: 34091 - DNA, 20 bp, Artificial Sequence
  Synthetic
agacggcccagatcggagag

SEQ ID NO: 34092 - DNA, 20 bp, Artificial Sequence
  Synthetic
gtaggagagacggcccagat

SEQ ID NO: 34093 - DNA, 20 bp, Artificial Sequence
  Synthetic
tctgggccgtctctcctacc

SEQ ID NO: 34094 - DNA, 20 bp, Artificial Sequence
  Synthetic
aatatgccaggtaggagaga

SEQ ID NO: 34095 - DNA, 20 bp, Artificial Sequence
  Synthetic
gtctctcctacctggcatat

SEQ ID NO: 34096 - DNA, 20 bp, Artificial Sequence
  Synthetic
gctcttccaatatgccaggt

SEQ ID NO: 34097 - DNA, 20 bp, Artificial Sequence
  Synthetic
tgacgctcttccaatatgcc

SEQ ID NO: 34098 - DNA, 20 bp, Artificial Sequence
  Synthetic
atattggaagagcgtcatct

SEQ ID NO: 34099 - DNA, 20 bp, Artificial Sequence
  Synthetic
atctctaccaccaccatgag

SEQ ID NO: 34100 - DNA, 20 bp, Artificial Sequence
  Synthetic
tgatgtgcctctcatggtgg

SEQ ID NO: 34101 - DNA, 20 bp, Artificial Sequence
  Synthetic
tgctgatgtgcctctcatgg

SEQ ID NO: 34102 - DNA, 20 bp, Artificial Sequence
  Synthetic
tgatgctgatgtgcctctca

SEQ ID NO: 34103 - DNA, 20 bp, Artificial Sequence
  Synthetic
tgagaggcacatcagcatca

SEQ ID NO: 34104 - DNA, 20 bp, Artificial Sequence
  Synthetic
caaggcaattagcagagcga

SEQ ID NO: 34105 - DNA, 20 bp, Artificial Sequence
  Synthetic
aaggcaattagcagagcgac

SEQ ID NO: 34106 - DNA, 20 bp, Artificial Sequence
  Synthetic
gagtggtggcaatgtcatgt

SEQ ID NO: 34107 - DNA, 20 bp, Artificial Sequence
  Synthetic
agagtggtggcaatgtcatg

SEQ ID NO: 34108 - DNA, 20 bp, Artificial Sequence
  Synthetic
gtggaggtgctgcagagtgg

SEQ ID NO: 34109 - DNA, 20 bp, Artificial Sequence
  Synthetic
catgtggaggtgctgcagag

SEQ ID NO: 34110 - DNA, 20 bp, Artificial Sequence
  Synthetic
ctctcttgtcgatcatgtgg

SEQ ID NO: 34111 - DNA, 20 bp, Artificial Sequence
  Synthetic
catctctcttgtcgatcatg

SEQ ID NO: 34112 - DNA, 20 bp, Artificial Sequence
  Synthetic
cacatgatcgacaagagaga

SEQ ID NO: 34113 - DNA, 20 bp, Artificial Sequence
  Synthetic
tgatcgacaagagagatggc

SEQ ID NO: 34114 - DNA, 20 bp, Artificial Sequence
  Synthetic
tgtgtgtggaaacacccacc

SEQ ID NO: 34115 - DNA, 20 bp, Artificial Sequence
  Synthetic
gatatatctcatcaccaggt

SEQ ID NO: 34116 - DNA, 20 bp, Artificial Sequence
  Synthetic
cgatatatctcatcaccagg

SEQ ID NO: 34117 - DNA, 20 bp, Artificial Sequence
  Synthetic
ttgcgatatatctcatcacc

SEQ ID NO: 34118 - DNA, 20 bp, Artificial Sequence
  Synthetic
ggtgatgagatatatcgcaa

SEQ ID NO: 34119 - DNA, 20 bp, Artificial Sequence
  Synthetic
ttcaatctctgtgtttgaag

SEQ ID NO: 34120 - DNA, 20 bp, Artificial Sequence
  Synthetic
atctctgtgtttgaagtgga

SEQ ID NO: 34121 - DNA, 20 bp, Artificial Sequence
  Synthetic
agtggatggcaagaaaaaca

SEQ ID NO: 34122 - DNA, 20 bp, Artificial Sequence
  Synthetic
acaggttttggcagtagatc

SEQ ID NO: 34123 - DNA, 20 bp, Artificial Sequence
  Synthetic
ctgccaaaacctgtgcctgt

SEQ ID NO: 34124 - DNA, 20 bp, Artificial Sequence
  Synthetic
tggccaacaggcacaggttt

SEQ ID NO: 34125 - DNA, 20 bp, Artificial Sequence
  Synthetic
aaagtttggccaacaggcac

SEQ ID NO: 34126 - DNA, 20 bp, Artificial Sequence
  Synthetic
ccagaaaaagtttggccaac

SEQ ID NO: 34127 - DNA, 20 bp, Artificial Sequence
  Synthetic
cctgttggccaaactttttc

SEQ ID NO: 34128 - DNA, 20 bp, Artificial Sequence
  Synthetic
cttgtggtccagaaaaagtt

SEQ ID NO: 34129 - DNA, 20 bp, Artificial Sequence
  Synthetic
catcataatataatgtcttg

SEQ ID NO: 34130 - DNA, 20 bp, Artificial Sequence
  Synthetic
caagacattatattatgatg

SEQ ID NO: 34131 - DNA, 20 bp, Artificial Sequence
  Synthetic
gtcataacatagaacaggaa

SEQ ID NO: 34132 - DNA, 20 bp, Artificial Sequence
  Synthetic
tgtcataacatagaacagga

SEQ ID NO: 34133 - DNA, 20 bp, Artificial Sequence
  Synthetic
cctctgtcataacatagaac

SEQ ID NO: 34134 - DNA, 20 bp, Artificial Sequence
  Synthetic
cctgttctatgttatgacag

SEQ ID NO: 34135 - DNA, 20 bp, Artificial Sequence
  Synthetic
gttctatgttatgacagagg

SEQ ID NO: 34136 - DNA, 20 bp, Artificial Sequence
  Synthetic
atgacagaggcggacaacac

SEQ ID NO: 34137 - DNA, 20 bp, Artificial Sequence
  Synthetic
aacactggctgtcacctgat

SEQ ID NO: 34138 - DNA, 20 bp, Artificial Sequence
  Synthetic
ccttagaaaaatatccaatc

SEQ ID NO: 34139 - DNA, 20 bp, Artificial Sequence
  Synthetic
cctgattggatatttttcta

SEQ ID NO: 34140 - DNA, 20 bp, Artificial Sequence
  Synthetic
tacaggagacgttgtagttg

SEQ ID NO: 34141 - DNA, 20 bp, Artificial Sequence
  Synthetic
ctgaggcatagtaaggatac

SEQ ID NO: 34142 - DNA, 20 bp, Artificial Sequence
  Synthetic
tcatgtactgaggcatagta

SEQ ID NO: 34143 - DNA, 20 bp, Artificial Sequence
  Synthetic
tatgcctcagtacatgagac

SEQ ID NO: 34144 - DNA, 20 bp, Artificial Sequence
  Synthetic
atgcctcagtacatgagaca

SEQ ID NO: 34145 - DNA, 20 bp, Artificial Sequence
  Synthetic
tagccctgtctcatgtactg

SEQ ID NO: 34146 - DNA, 20 bp, Artificial Sequence
  Synthetic
cagtacatgagacagggcta

SEQ ID NO: 34147 - DNA, 20 bp, Artificial Sequence
  Synthetic
tccaaagtcgaagaaaaagt

SEQ ID NO: 34148 - DNA, 20 bp, Artificial Sequence
  Synthetic
gccaactttttcttcgactt

SEQ ID NO: 34149 - DNA, 20 bp, Artificial Sequence
  Synthetic
atctgagagtggacgttctg

SEQ ID NO: 34150 - DNA, 20 bp, Artificial Sequence
  Synthetic
gatctgagagtggacgttct

SEQ ID NO: 34151 - DNA, 20 bp, Artificial Sequence
  Synthetic
agatctgagagtggacgttc

SEQ ID NO: 34152 - DNA, 20 bp, Artificial Sequence
  Synthetic
agaacgtccactctcagatc

SEQ ID NO: 34153 - DNA, 20 bp, Artificial Sequence
  Synthetic
gaacgtccactctcagatct

SEQ ID NO: 34154 - DNA, 20 bp, Artificial Sequence
  Synthetic
aacgtccactctcagatctg

SEQ ID NO: 34155 - DNA, 20 bp, Artificial Sequence
  Synthetic
ataagccccagatctgagag

SEQ ID NO: 34156 - DNA, 20 bp, Artificial Sequence
  Synthetic
ttataagctatcgcagttac

SEQ ID NO: 34157 - DNA, 20 bp, Artificial Sequence
  Synthetic
cttgaaaattatgcaggtag

SEQ ID NO: 34158 - DNA, 20 bp, Artificial Sequence
  Synthetic
cgctacctgcataattttca

SEQ ID NO: 34159 - DNA, 20 bp, Artificial Sequence
  Synthetic
ctttgccttgaaaattatgc

SEQ ID NO: 34160 - DNA, 20 bp, Artificial Sequence
  Synthetic
ggcaaagagatttctatcaa

SEQ ID NO: 34161 - DNA, 20 bp, Artificial Sequence
  Synthetic
aagagatttctatcaaaggt

SEQ ID NO: 34162 - DNA, 20 bp, Artificial Sequence
  Synthetic
ttctgtttcagaaatcagtc

SEQ ID NO: 34163 - DNA, 20 bp, Artificial Sequence
  Synthetic
ttcagaaatcagtcaggaga

SEQ ID NO: 34164 - DNA, 20 bp, Artificial Sequence
  Synthetic
ggagacggctgtgaatcctg

SEQ ID NO: 34165 - DNA, 20 bp, Artificial Sequence
  Synthetic
agagtgctgacaatgtccac

SEQ ID NO: 34166 - DNA, 20 bp, Artificial Sequence
  Synthetic
ccagtatttgagcatctgaa

SEQ ID NO: 34167 - DNA, 20 bp, Artificial Sequence
  Synthetic
cccttcagatgctcaaatac

SEQ ID NO: 34168 - DNA, 20 bp, Artificial Sequence
  Synthetic
tccagtatttgagcatctga

SEQ ID NO: 34169 - DNA, 20 bp, Artificial Sequence
  Synthetic
tcagatgctcaaatactgga

SEQ ID NO: 34170 - DNA, 20 bp, Artificial Sequence
  Synthetic
cagatgctcaaatactggaa

SEQ ID NO: 34171 - DNA, 20 bp, Artificial Sequence
  Synthetic
ttacctgtctctttaaaact

SEQ ID NO: 34172 - DNA, 20 bp, Artificial Sequence
  Synthetic
accagggtcagtgccagtgg

SEQ ID NO: 34173 - DNA, 20 bp, Artificial Sequence
  Synthetic
tgccagtggcggcagccccc

SEQ ID NO: 34174 - DNA, 20 bp, Artificial Sequence
  Synthetic
gccagtggcggcagcccccc

SEQ ID NO: 34175 - DNA, 20 bp, Artificial Sequence
  Synthetic
tcccggggggctgccgccac

SEQ ID NO: 34176 - DNA, 20 bp, Artificial Sequence
  Synthetic
cggtagatctctttcccggg

SEQ ID NO: 34177 - DNA, 20 bp, Artificial Sequence
  Synthetic
gcggtagatctctttcccgg

SEQ ID NO: 34178 - DNA, 20 bp, Artificial Sequence
  Synthetic
tgcggtagatctctttcccg

SEQ ID NO: 34179 - DNA, 20 bp, Artificial Sequence
  Synthetic
ttgcggtagatctctttccc

SEQ ID NO: 34180 - DNA, 20 bp, Artificial Sequence
  Synthetic
cttgcggtagatctctttcc

SEQ ID NO: 34181 - DNA, 20 bp, Artificial Sequence
  Synthetic
acacggagatgttgctcttg

SEQ ID NO: 34182 - DNA, 20 bp, Artificial Sequence
  Synthetic
atctccgtgtacgaagttga

SEQ ID NO: 34183 - DNA, 20 bp, Artificial Sequence
  Synthetic
tttgccatcaacttcgtaca

SEQ ID NO: 34184 - DNA, 20 bp, Artificial Sequence
  Synthetic
agttgatggcaaagaccata

SEQ ID NO: 34185 - DNA, 20 bp, Artificial Sequence
  Synthetic
ctggccacccactcacctta

SEQ ID NO: 34186 - DNA, 20 bp, Artificial Sequence
  Synthetic
ctgtcagaacctgtgtctgc

SEQ ID NO: 34187 - DNA, 20 bp, Artificial Sequence
  Synthetic
aaagcttggccagcagacac

SEQ ID NO: 34188 - DNA, 20 bp, Artificial Sequence
  Synthetic
tctgctggccaagcttttcc

SEQ ID NO: 34189 - DNA, 20 bp, Artificial Sequence
  Synthetic
cttatggtccaggaaaagct

SEQ ID NO: 34190 - DNA, 20 bp, Artificial Sequence
  Synthetic
agtacagtgtcttatggtcc

SEQ ID NO: 34191 - DNA, 20 bp, Artificial Sequence
  Synthetic
cgtcaaagtacagtgtctta

SEQ ID NO: 34192 - DNA, 20 bp, Artificial Sequence
  Synthetic
taagacactgtactttgacg

SEQ ID NO: 34193 - DNA, 20 bp, Artificial Sequence
  Synthetic
gtcaggatgtaaaagacgaa

SEQ ID NO: 34194 - DNA, 20 bp, Artificial Sequence
  Synthetic
cgtcttttacatcctgactg

SEQ ID NO: 34195 - DNA, 20 bp, Artificial Sequence
  Synthetic
cttttacatcctgactgagg

SEQ ID NO: 34196 - DNA, 20 bp, Artificial Sequence
  Synthetic
acatcctgactgaggtggac

SEQ ID NO: 34197 - DNA, 20 bp, Artificial Sequence
  Synthetic
cctgccggtccacctcagtc

SEQ ID NO: 34198 - DNA, 20 bp, Artificial Sequence
  Synthetic
cctgactgaggtggaccggc

SEQ ID NO: 34199 - DNA, 20 bp, Artificial Sequence
  Synthetic
ctgactgaggtggaccggca

SEQ ID NO: 34200 - DNA, 20 bp, Artificial Sequence
  Synthetic
tgactgaggtggaccggcag

SEQ ID NO: 34201 - DNA, 20 bp, Artificial Sequence
  Synthetic
gactgaggtggaccggcagg

SEQ ID NO: 34202 - DNA, 20 bp, Artificial Sequence
  Synthetic
caacaatgtgggccccctgc

SEQ ID NO: 34203 - DNA, 20 bp, Artificial Sequence
  Synthetic
cggcagggggcccacattgt

SEQ ID NO: 34204 - DNA, 20 bp, Artificial Sequence
  Synthetic
ggagaagtagccaacaatgt

SEQ ID NO: 34205 - DNA, 20 bp, Artificial Sequence
  Synthetic
tggagaagtagccaacaatg

SEQ ID NO: 34206 - DNA, 20 bp, Artificial Sequence
  Synthetic
cattgttggctacttctcca

SEQ ID NO: 34207 - DNA, 20 bp, Artificial Sequence
  Synthetic
cacctgcctcctgcaggaga

SEQ ID NO: 34208 - DNA, 20 bp, Artificial Sequence
  Synthetic
cctgcaggagaaggagtccc

SEQ ID NO: 34209 - DNA, 20 bp, Artificial Sequence
  Synthetic
caggagaaggagtccccgga

SEQ ID NO: 34210 - DNA, 20 bp, Artificial Sequence
  Synthetic
gtccccggatggaaacaatg

SEQ ID NO: 34211 - DNA, 20 bp, Artificial Sequence
  Synthetic
ggccacattgtttccatccg

SEQ ID NO: 34212 - DNA, 20 bp, Artificial Sequence
  Synthetic
aggccacattgtttccatcc

SEQ ID NO: 34213 - DNA, 20 bp, Artificial Sequence
  Synthetic
caggccacattgtttccatc

SEQ ID NO: 34214 - DNA, 20 bp, Artificial Sequence
  Synthetic
ggggggcaaggtcaggatgc

SEQ ID NO: 34215 - DNA, 20 bp, Artificial Sequence
  Synthetic
gttggtaggggggcaaggtc

SEQ ID NO: 34216 - DNA, 20 bp, Artificial Sequence
  Synthetic
gcggcgttggtaggggggca

SEQ ID NO: 34217 - DNA, 20 bp, Artificial Sequence
  Synthetic
ttgcccccctaccaacgccg

SEQ ID NO: 34218 - DNA, 20 bp, Artificial Sequence
  Synthetic
tagccgcggcgttggtaggg

SEQ ID NO: 34219 - DNA, 20 bp, Artificial Sequence
  Synthetic
gtagccgcggcgttggtagg

SEQ ID NO: 34220 - DNA, 20 bp, Artificial Sequence
  Synthetic
cgtagccgcggcgttggtag

SEQ ID NO: 34221 - DNA, 20 bp, Artificial Sequence
  Synthetic
ccgtagccgcggcgttggta

SEQ ID NO: 34222 - DNA, 20 bp, Artificial Sequence
  Synthetic
ccctaccaacgccgcggcta

SEQ ID NO: 34223 - DNA, 20 bp, Artificial Sequence
  Synthetic
cccgtagccgcggcgttggt

SEQ ID NO: 34224 - DNA, 20 bp, Artificial Sequence
  Synthetic
cctaccaacgccgcggctac

SEQ ID NO: 34225 - DNA, 20 bp, Artificial Sequence
  Synthetic
acttcccgtagccgcggcgt

SEQ ID NO: 34226 - DNA, 20 bp, Artificial Sequence
  Synthetic
tgaggaacttcccgtagccg

SEQ ID NO: 34227 - DNA, 20 bp, Artificial Sequence
  Synthetic
accactcactgaaagcgatg

SEQ ID NO: 34228 - DNA, 20 bp, Artificial Sequence
  Synthetic
agcttggagagctcataacc

SEQ ID NO: 34229 - DNA, 20 bp, Artificial Sequence
  Synthetic
aggttatgagctctccaagc

SEQ ID NO: 34230 - DNA, 20 bp, Artificial Sequence
  Synthetic
tccaagctggagagcacagt

SEQ ID NO: 34231 - DNA, 20 bp, Artificial Sequence
  Synthetic
gccgactgtgctctccagct

SEQ ID NO: 34232 - DNA, 20 bp, Artificial Sequence
  Synthetic
ggagagcacagtcggctccc

SEQ ID NO: 34233 - DNA, 20 bp, Artificial Sequence
  Synthetic
gtcagacagtggcttctccg

SEQ ID NO: 34234 - DNA, 20 bp, Artificial Sequence
  Synthetic
ggtcagacagtggcttctcc

SEQ ID NO: 34235 - DNA, 20 bp, Artificial Sequence
  Synthetic
aggtcagacagtggcttctc

SEQ ID NO: 34236 - DNA, 20 bp, Artificial Sequence
  Synthetic
ggagaagccactgtctgacc

SEQ ID NO: 34237 - DNA, 20 bp, Artificial Sequence
  Synthetic
gagaagccactgtctgacct

SEQ ID NO: 34238 - DNA, 20 bp, Artificial Sequence
  Synthetic
agcttgcccaggtcagacag

SEQ ID NO: 34239 - DNA, 20 bp, Artificial Sequence
  Synthetic
tgcggtagctgagcttgccc

SEQ ID NO: 34240 - DNA, 20 bp, Artificial Sequence
  Synthetic
agctcagctaccgcagctac

SEQ ID NO: 34241 - DNA, 20 bp, Artificial Sequence
  Synthetic
gctaccgcagctactggtcc

SEQ ID NO: 34242 - DNA, 20 bp, Artificial Sequence
  Synthetic
ctaccgcagctactggtcct

SEQ ID NO: 34243 - DNA, 20 bp, Artificial Sequence
  Synthetic
gcacccaggaccagtagctg

SEQ ID NO: 34244 - DNA, 20 bp, Artificial Sequence
  Synthetic
caggatctctagcagcaccc

SEQ ID NO: 34245 - DNA, 20 bp, Artificial Sequence
  Synthetic
gggtgctgctagagatcctg

SEQ ID NO: 34246 - DNA, 20 bp, Artificial Sequence
  Synthetic
ggtgctgctagagatcctgc

SEQ ID NO: 34247 - DNA, 20 bp, Artificial Sequence
  Synthetic
tagagatcctgcgggacttc

SEQ ID NO: 34248 - DNA, 20 bp, Artificial Sequence
  Synthetic
agagatcctgcgggacttcc

SEQ ID NO: 34249 - DNA, 20 bp, Artificial Sequence
  Synthetic
gagatcctgcgggacttccg

SEQ ID NO: 34250 - DNA, 20 bp, Artificial Sequence
  Synthetic
gtgtgccccggaagtcccgc

SEQ ID NO: 34251 - DNA, 20 bp, Artificial Sequence
  Synthetic
ccttgatggacagtgtgccc

SEQ ID NO: 34252 - DNA, 20 bp, Artificial Sequence
  Synthetic
ccggggcacactgtccatca

SEQ ID NO: 34253 - DNA, 20 bp, Artificial Sequence
  Synthetic
cactgtccatcaaggacctc

SEQ ID NO: 34254 - DNA, 20 bp, Artificial Sequence
  Synthetic
ccctcacctgaggtccttga

SEQ ID NO: 34255 - DNA, 20 bp, Artificial Sequence
  Synthetic
ccgggaggccccctcacctg

SEQ ID NO: 34256 - DNA, 20 bp, Artificial Sequence
  Synthetic
tttgggtgatactggtcatc

SEQ ID NO: 34257 - DNA, 20 bp, Artificial Sequence
  Synthetic
gatgtcattttgggtgatac

SEQ ID NO: 34258 - DNA, 20 bp, Artificial Sequence
  Synthetic
ggtactgatgatgtcatttt

SEQ ID NO: 34259 - DNA, 20 bp, Artificial Sequence
  Synthetic
gggtactgatgatgtcattt

SEQ ID NO: 34260 - DNA, 20 bp, Artificial Sequence
  Synthetic
taccctgcaatccctcaata

SEQ ID NO: 34261 - DNA, 20 bp, Artificial Sequence
  Synthetic
gaccatattgagggattgca

SEQ ID NO: 34262 - DNA, 20 bp, Artificial Sequence
  Synthetic
tgaccatattgagggattgc

SEQ ID NO: 34263 - DNA, 20 bp, Artificial Sequence
  Synthetic
ccagtacttgaccatattga

SEQ ID NO: 34264 - DNA, 20 bp, Artificial Sequence
  Synthetic
ccctcaatatggtcaagtac

SEQ ID NO: 34265 - DNA, 20 bp, Artificial Sequence
  Synthetic
tccagtacttgaccatattg

SEQ ID NO: 34266 - DNA, 20 bp, Artificial Sequence
  Synthetic
caatatggtcaagtactgga

SEQ ID NO: 34267 - DNA, 20 bp, Artificial Sequence
  Synthetic
aatatggtcaagtactggaa

SEQ ID NO: 34268 - DNA, 20 bp, Artificial Sequence
  Synthetic
gtgtgacacagatcacgtgc

SEQ ID NO: 34269 - DNA, 20 bp, Artificial Sequence
  Synthetic
ccggaagtcacggtggagat

SEQ ID NO: 34270 - DNA, 20 bp, Artificial Sequence
  Synthetic
tcggagaaacgtacctgtgc

SEQ ID NO: 34271 - DNA, 20 bp, Artificial Sequence
  Synthetic
aacgtacctgtgccggcgac

SEQ ID NO: 34272 - DNA, 20 bp, Artificial Sequence
  Synthetic
tgctatccggtcgccggcac

SEQ ID NO: 34273 - DNA, 20 bp, Artificial Sequence
  Synthetic
gccggcgaccggatagcacc

SEQ ID NO: 34274 - DNA, 20 bp, Artificial Sequence
  Synthetic
gccaggtgctatccggtcgc

SEQ ID NO: 34275 - DNA, 20 bp, Artificial Sequence
  Synthetic
ccctcacgccaggtgctatc

SEQ ID NO: 34276 - DNA, 20 bp, Artificial Sequence
  Synthetic
ctgggccccgccctcacgcc

SEQ ID NO: 34277 - DNA, 20 bp, Artificial Sequence
  Synthetic
cctggtcgttcactcgagac

SEQ ID NO: 34278 - DNA, 20 bp, Artificial Sequence
  Synthetic
ccagtctcgagtgaacgacc

SEQ ID NO: 34279 - DNA, 20 bp, Artificial Sequence
  Synthetic
gtctcgagtgaacgaccagg

SEQ ID NO: 34280 - DNA, 20 bp, Artificial Sequence
  Synthetic
tctcgagtgaacgaccagga

SEQ ID NO: 34281 - DNA, 20 bp, Artificial Sequence
  Synthetic
gaacgaccaggagggccgag

SEQ ID NO: 34282 - DNA, 20 bp, Artificial Sequence
  Synthetic
agaattcctctcggccctcc

SEQ ID NO: 34283 - DNA, 20 bp, Artificial Sequence
  Synthetic
agtgtacatagaattcctct

SEQ ID NO: 34284 - DNA, 20 bp, Artificial Sequence
  Synthetic
ggaattctatgtacactacg

SEQ ID NO: 34285 - DNA, 20 bp, Artificial Sequence
  Synthetic
gaattctatgtacactacgt

SEQ ID NO: 34286 - DNA, 20 bp, Artificial Sequence
  Synthetic
ggcccatacttacagttaac

SEQ ID NO: 34287 - DNA, 20 bp, Artificial Sequence
  Synthetic
ccatacttacagttaaccgg

SEQ ID NO: 34288 - DNA, 20 bp, Artificial Sequence
  Synthetic
acttacagttaaccggcggc

SEQ ID NO: 34289 - DNA, 20 bp, Artificial Sequence
  Synthetic
ttaaccggcggctggacgag

SEQ ID NO: 34290 - DNA, 20 bp, Artificial Sequence
  Synthetic
taaccggcggctggacgagt

SEQ ID NO: 34291 - DNA, 20 bp, Artificial Sequence
  Synthetic
ctacccactcgtccagccgc

SEQ ID NO: 34292 - DNA, 20 bp, Artificial Sequence
  Synthetic
acgagtgggtagacaagaac

SEQ ID NO: 34293 - DNA, 20 bp, Artificial Sequence
  Synthetic
gtgggtagacaagaaccggc

SEQ ID NO: 34294 - DNA, 20 bp, Artificial Sequence
  Synthetic
ctgtcttggtcagcgccagc

SEQ ID NO: 34295 - DNA, 20 bp, Artificial Sequence
  Synthetic
attataggctctggggtctc

SEQ ID NO: 34296 - DNA, 20 bp, Artificial Sequence
  Synthetic
aggctctggggtctcaggct

SEQ ID NO: 34297 - DNA, 20 bp, Artificial Sequence
  Synthetic
gctcgacagttacaaagttt

SEQ ID NO: 34298 - DNA, 20 bp, Artificial Sequence
  Synthetic
acagttacaaagttttggaa

SEQ ID NO: 34299 - DNA, 20 bp, Artificial Sequence
  Synthetic
tggaatggatgtcacacttt

SEQ ID NO: 34300 - DNA, 20 bp, Artificial Sequence
  Synthetic
atgtcacacttttggaagcc

SEQ ID NO: 34301 - DNA, 20 bp, Artificial Sequence
  Synthetic
tgtcacacttttggaagcca

SEQ ID NO: 34302 - DNA, 20 bp, Artificial Sequence
  Synthetic
atttctgaaacaggatcgtg

SEQ ID NO: 34303 - DNA, 20 bp, Artificial Sequence
  Synthetic
tttctgaaacaggatcgtgt

SEQ ID NO: 34304 - DNA, 20 bp, Artificial Sequence
  Synthetic
ctgaaacaggatcgtgtggg

SEQ ID NO: 34305 - DNA, 20 bp, Artificial Sequence
  Synthetic
cgagttgccacatttcgcaa

SEQ ID NO: 34306 - DNA, 20 bp, Artificial Sequence
  Synthetic
atagtttcctttgcgaaatg

SEQ ID NO: 34307 - DNA, 20 bp, Artificial Sequence
  Synthetic
ggaaactatgtagctgatct

SEQ ID NO: 34308 - DNA, 20 bp, Artificial Sequence
  Synthetic
tgtagctgatcttggagcca

SEQ ID NO: 34309 - DNA, 20 bp, Artificial Sequence
  Synthetic
agctgatcttggagccatgg

SEQ ID NO: 34310 - DNA, 20 bp, Artificial Sequence
  Synthetic
cttggagccatggtggtaac

SEQ ID NO: 34311 - DNA, 20 bp, Artificial Sequence
  Synthetic
gccatggtggtaacaggtct

SEQ ID NO: 34312 - DNA, 20 bp, Artificial Sequence
  Synthetic
accaagacctgttaccacca

SEQ ID NO: 34313 - DNA, 20 bp, Artificial Sequence
  Synthetic
ttttctaggagggaatccta

SEQ ID NO: 34314 - DNA, 20 bp, Artificial Sequence
  Synthetic
aggagggaatcctatggctg

SEQ ID NO: 34315 - DNA, 20 bp, Artificial Sequence
  Synthetic
tgtttgctgaccacagccat

SEQ ID NO: 34316 - DNA, 20 bp, Artificial Sequence
  Synthetic
ggtcagcaaacaagtaaata

SEQ ID NO: 34317 - DNA, 20 bp, Artificial Sequence
  Synthetic
caaacaagtaaatatggaac

SEQ ID NO: 34318 - DNA, 20 bp, Artificial Sequence
  Synthetic
tgggcatttttgcttgatct

SEQ ID NO: 34319 - DNA, 20 bp, Artificial Sequence
  Synthetic
tgcccactttatgaagccaa

SEQ ID NO: 34320 - DNA, 20 bp, Artificial Sequence
  Synthetic
gtccgttggcttcataaagt

SEQ ID NO: 34321 - DNA, 20 bp, Artificial Sequence
  Synthetic
tgtccgttggcttcataaag

SEQ ID NO: 34322 - DNA, 20 bp, Artificial Sequence
  Synthetic
tcgacttacagcttgtccgt

SEQ ID NO: 34323 - DNA, 20 bp, Artificial Sequence
  Synthetic
tcctaaagagaaagatgaaa

SEQ ID NO: 34324 - DNA, 20 bp, Artificial Sequence
  Synthetic
accatttcatctttctcttt

SEQ ID NO: 34325 - DNA, 20 bp, Artificial Sequence
  Synthetic
tggtagagcaagagtttaac

SEQ ID NO: 34326 - DNA, 20 bp, Artificial Sequence
  Synthetic
aagatgtagcttctagcaac

SEQ ID NO: 34327 - DNA, 20 bp, Artificial Sequence
  Synthetic
tgaagtctagttgatgacta

SEQ ID NO: 34328 - DNA, 20 bp, Artificial Sequence
  Synthetic
gggacacaggcttattattg

SEQ ID NO: 34329 - DNA, 20 bp, Artificial Sequence
  Synthetic
aataataagcctgtgtccct

SEQ ID NO: 34330 - DNA, 20 bp, Artificial Sequence
  Synthetic
taagcctgtgtcccttggcc

SEQ ID NO: 34331 - DNA, 20 bp, Artificial Sequence
  Synthetic
aatgcctggccaagggacac

SEQ ID NO: 34332 - DNA, 20 bp, Artificial Sequence
  Synthetic
tgtgtcccttggccaggcat

SEQ ID NO: 34333 - DNA, 20 bp, Artificial Sequence
  Synthetic
aacttccaatgcctggccaa

SEQ ID NO: 34334 - DNA, 20 bp, Artificial Sequence
  Synthetic
caacttccaatgcctggcca

SEQ ID NO: 34335 - DNA, 20 bp, Artificial Sequence
  Synthetic
gaatgacaacttccaatgcc

SEQ ID NO: 34336 - DNA, 20 bp, Artificial Sequence
  Synthetic
aagatgagcagattgaacat

SEQ ID NO: 34337 - DNA, 20 bp, Artificial Sequence
  Synthetic
gaagaagatagtgaaaactc

SEQ ID NO: 34338 - DNA, 20 bp, Artificial Sequence
  Synthetic
attgaaagaacttcttaata

SEQ ID NO: 34339 - DNA, 20 bp, Artificial Sequence
  Synthetic
atgcttctttgtattgctga

SEQ ID NO: 34340 - DNA, 20 bp, Artificial Sequence
  Synthetic
tcggcagtaatatctctggg

SEQ ID NO: 34341 - DNA, 20 bp, Artificial Sequence
  Synthetic
aactcggcagtaatatctct

SEQ ID NO: 34342 - DNA, 20 bp, Artificial Sequence
  Synthetic
gaactcggcagtaatatctc

SEQ ID NO: 34343 - DNA, 20 bp, Artificial Sequence
  Synthetic
tttgcttttcactaagaact

SEQ ID NO: 34344 - DNA, 20 bp, Artificial Sequence
  Synthetic
tcttagtgaaaagcaaacac

SEQ ID NO: 34345 - DNA, 20 bp, Artificial Sequence
  Synthetic
cttagtgaaaagcaaacaca

SEQ ID NO: 34346 - DNA, 20 bp, Artificial Sequence
  Synthetic
ggatctgaccgccctatgca

SEQ ID NO: 34347 - DNA, 20 bp, Artificial Sequence
  Synthetic
ataccacaccttgcataggg

SEQ ID NO: 34348 - DNA, 20 bp, Artificial Sequence
  Synthetic
tgtataccacaccttgcata

SEQ ID NO: 34349 - DNA, 20 bp, Artificial Sequence
  Synthetic
atgtataccacaccttgcat

SEQ ID NO: 34350 - DNA, 20 bp, Artificial Sequence
  Synthetic
gatgaattagctgaaacaca

SEQ ID NO: 34351 - DNA, 20 bp, Artificial Sequence
  Synthetic
aaagctagaagaaaaacttc

SEQ ID NO: 34352 - DNA, 20 bp, Artificial Sequence
  Synthetic
agaagaaaaacttcaggagt

SEQ ID NO: 34353 - DNA, 20 bp, Artificial Sequence
  Synthetic
agttggaagcgaatccccca

SEQ ID NO: 34354 - DNA, 20 bp, Artificial Sequence
  Synthetic
gtttgttttccttaccttgg

SEQ ID NO: 34355 - DNA, 20 bp, Artificial Sequence
  Synthetic
tgtttgttttccttaccttg

SEQ ID NO: 34356 - DNA, 20 bp, Artificial Sequence
  Synthetic
gtgtttgttttccttacctt

SEQ ID NO: 34357 - DNA, 20 bp, Artificial Sequence
  Synthetic
gagacagacaaatacttgat

SEQ ID NO: 34358 - DNA, 20 bp, Artificial Sequence
  Synthetic
ggagagagttgagagaggtg

SEQ ID NO: 34359 - DNA, 20 bp, Artificial Sequence
  Synthetic
ttaagggagagagttgagag

SEQ ID NO: 34360 - DNA, 20 bp, Artificial Sequence
  Synthetic
caactctctcccttaagcac

SEQ ID NO: 34361 - DNA, 20 bp, Artificial Sequence
  Synthetic
aactctctcccttaagcact

SEQ ID NO: 34362 - DNA, 20 bp, Artificial Sequence
  Synthetic
ctcccttaagcactgggatc

SEQ ID NO: 34363 - DNA, 20 bp, Artificial Sequence
  Synthetic
tacctgatcccagtgcttaa

SEQ ID NO: 34364 - DNA, 20 bp, Artificial Sequence
  Synthetic
ttacctgatcccagtgctta

SEQ ID NO: 34365 - DNA, 20 bp, Artificial Sequence
  Synthetic
gatgatgactttgagttcac

SEQ ID NO: 34366 - DNA, 20 bp, Artificial Sequence
  Synthetic
ctggcagccacctgacagta

SEQ ID NO: 34367 - DNA, 20 bp, Artificial Sequence
  Synthetic
agccacctgacagtaaggaa

SEQ ID NO: 34368 - DNA, 20 bp, Artificial Sequence
  Synthetic
agccattccttactgtcagg

SEQ ID NO: 34369 - DNA, 20 bp, Artificial Sequence
  Synthetic
agtagccattccttactgtc

SEQ ID NO: 34370 - DNA, 20 bp, Artificial Sequence
  Synthetic
tggctactcgtgtgtgcctg

SEQ ID NO: 34371 - DNA, 20 bp, Artificial Sequence
  Synthetic
gtgcctgtggctttagcaga

SEQ ID NO: 34372 - DNA, 20 bp, Artificial Sequence
  Synthetic
aggccttctgctaaagccac

SEQ ID NO: 34373 - DNA, 20 bp, Artificial Sequence
  Synthetic
ctgtattcagtttaatgtct

SEQ ID NO: 34374 - DNA, 20 bp, Artificial Sequence
  Synthetic
actgaatacagcagtgcgac

SEQ ID NO: 34375 - DNA, 20 bp, Artificial Sequence
  Synthetic
agtgcgacaggttcgctaca

SEQ ID NO: 34376 - DNA, 20 bp, Artificial Sequence
  Synthetic
caggttcgctacacggcttc

SEQ ID NO: 34377 - DNA, 20 bp, Artificial Sequence
  Synthetic
aaaggtttgactcgtggagc

SEQ ID NO: 34378 - DNA, 20 bp, Artificial Sequence
  Synthetic
taaaggtttgactcgtggag

SEQ ID NO: 34379 - DNA, 20 bp, Artificial Sequence
  Synthetic
ataaataaaggtttgactcg

SEQ ID NO: 34380 - DNA, 20 bp, Artificial Sequence
  Synthetic
tgcgtcgcatttataaataa

SEQ ID NO: 34381 - DNA, 20 bp, Artificial Sequence
  Synthetic
agttctctgtacccttcccc

SEQ ID NO: 34382 - DNA, 20 bp, Artificial Sequence
  Synthetic
gttctctgtacccttcccct

SEQ ID NO: 34383 - DNA, 20 bp, Artificial Sequence
  Synthetic
cttcagcacacccaggggaa

SEQ ID NO: 34384 - DNA, 20 bp, Artificial Sequence
  Synthetic
gcttcagcacacccagggga

SEQ ID NO: 34385 - DNA, 20 bp, Artificial Sequence
  Synthetic
tgctgcttcagcacacccag

SEQ ID NO: 34386 - DNA, 20 bp, Artificial Sequence
  Synthetic
ctgctgcttcagcacaccca

SEQ ID NO: 34387 - DNA, 20 bp, Artificial Sequence
  Synthetic
gctgctgcttcagcacaccc

SEQ ID NO: 34388 - DNA, 20 bp, Artificial Sequence
  Synthetic
ggcacaaactgaacggctgg

SEQ ID NO: 34389 - DNA, 20 bp, Artificial Sequence
  Synthetic
ggtggcacaaactgaacggc

SEQ ID NO: 34390 - DNA, 20 bp, Artificial Sequence
  Synthetic
gagaggtggcacaaactgaa

SEQ ID NO: 34391 - DNA, 20 bp, Artificial Sequence
  Synthetic
ttgtgccacctctccctgag

SEQ ID NO: 34392 - DNA, 20 bp, Artificial Sequence
  Synthetic
gttttccactcagggagagg

SEQ ID NO: 34393 - DNA, 20 bp, Artificial Sequence
  Synthetic
gatgttttccactcagggag

SEQ ID NO: 34394 - DNA, 20 bp, Artificial Sequence
  Synthetic
ctgcagatgttttccactca

SEQ ID NO: 34395 - DNA, 20 bp, Artificial Sequence
  Synthetic
actgcagatgttttccactc

SEQ ID NO: 34396 - DNA, 20 bp, Artificial Sequence
  Synthetic
ggaaaacatctgcagtccaa

SEQ ID NO: 34397 - DNA, 20 bp, Artificial Sequence
  Synthetic
aacatctgcagtccaaagga

SEQ ID NO: 34398 - DNA, 20 bp, Artificial Sequence
  Synthetic
acatctgcagtccaaaggat

SEQ ID NO: 34399 - DNA, 20 bp, Artificial Sequence
  Synthetic
gcagtccaaaggatgggatt

SEQ ID NO: 34400 - DNA, 20 bp, Artificial Sequence
  Synthetic
ggttgccaaatcccatcctt

SEQ ID NO: 34401 - DNA, 20 bp, Artificial Sequence
  Synthetic
gggatttggcaaccttaaca

SEQ ID NO: 34402 - DNA, 20 bp, Artificial Sequence
  Synthetic
tagggcaagctaccttgtta

SEQ ID NO: 34403 - DNA, 20 bp, Artificial Sequence
  Synthetic
aggtggtgttgtgttttgat

SEQ ID NO: 34404 - DNA, 20 bp, Artificial Sequence
  Synthetic
ggtggtgttgtgttttgatc

SEQ ID NO: 34405 - DNA, 20 bp, Artificial Sequence
  Synthetic
tgtgttttgatcgggtgttc

SEQ ID NO: 34406 - DNA, 20 bp, Artificial Sequence
  Synthetic
gtgttttgatcgggtgttct

SEQ ID NO: 34407 - DNA, 20 bp, Artificial Sequence
  Synthetic
gatccaagtgtcaatttgtt

SEQ ID NO: 34408 - DNA, 20 bp, Artificial Sequence
  Synthetic
atccaagtgtcaatttgttc

SEQ ID NO: 34409 - DNA, 20 bp, Artificial Sequence
  Synthetic
tgcccgaacaaattgacact

SEQ ID NO: 34410 - DNA, 20 bp, Artificial Sequence
  Synthetic
gtcaatttgttcgggcatgt

SEQ ID NO: 34411 - DNA, 20 bp, Artificial Sequence
  Synthetic
ttggcagtacgactgccagc

SEQ ID NO: 34412 - DNA, 20 bp, Artificial Sequence
  Synthetic
tggcagtacgactgccagca

SEQ ID NO: 34413 - DNA, 20 bp, Artificial Sequence
  Synthetic
ggcagtacgactgccagcag

SEQ ID NO: 34414 - DNA, 20 bp, Artificial Sequence
  Synthetic
gaggaagagctcacccctgc

SEQ ID NO: 34415 - DNA, 20 bp, Artificial Sequence
  Synthetic
ggggtgagctcttcctcttc

SEQ ID NO: 34416 - DNA, 20 bp, Artificial Sequence
  Synthetic
ctttatagaggttccagaag

SEQ ID NO: 34417 - DNA, 20 bp, Artificial Sequence
  Synthetic
ctcttctggaacctctataa

SEQ ID NO: 34418 - DNA, 20 bp, Artificial Sequence
  Synthetic
gaaggcatttacctttatag

SEQ ID NO: 34419 - DNA, 20 bp, Artificial Sequence
  Synthetic
ttccccagctccaatactgt

SEQ ID NO: 34420 - DNA, 20 bp, Artificial Sequence
  Synthetic
agtgccaacagtattggagc

SEQ ID NO: 34421 - DNA, 20 bp, Artificial Sequence
  Synthetic
tccaatactgttggcactag

SEQ ID NO: 34422 - DNA, 20 bp, Artificial Sequence
  Synthetic
gccactagtgccaacagtat

SEQ ID NO: 34423 - DNA, 20 bp, Artificial Sequence
  Synthetic
atactgttggcactagtggc

SEQ ID NO: 34424 - DNA, 20 bp, Artificial Sequence
  Synthetic
ctagtggcaggagaagctgc

SEQ ID NO: 34425 - DNA, 20 bp, Artificial Sequence
  Synthetic
aggagaagctgctggtatca

SEQ ID NO: 34426 - DNA, 20 bp, Artificial Sequence
  Synthetic
ataagtgacgatgtgattgt

SEQ ID NO: 34427 - DNA, 20 bp, Artificial Sequence
  Synthetic
tgtgattgttggccgatgcc

SEQ ID NO: 34428 - DNA, 20 bp, Artificial Sequence
  Synthetic
ctttgagaatggccaggcat

SEQ ID NO: 34429 - DNA, 20 bp, Artificial Sequence
  Synthetic
cgatgcctggccattctcaa

SEQ ID NO: 34430 - DNA, 20 bp, Artificial Sequence
  Synthetic
gatgcctggccattctcaaa

SEQ ID NO: 34431 - DNA, 20 bp, Artificial Sequence
  Synthetic
aaatccctttgagaatggcc

SEQ ID NO: 34432 - DNA, 20 bp, Artificial Sequence
  Synthetic
gccattctcaaagggatttt

SEQ ID NO: 34433 - DNA, 20 bp, Artificial Sequence
  Synthetic
accaaaaatccctttgagaa

SEQ ID NO: 34434 - DNA, 20 bp, Artificial Sequence
  Synthetic
tggtagcagtgcagtacctc

SEQ ID NO: 34435 - DNA, 20 bp, Artificial Sequence
  Synthetic
cccacctacctacttacctg

SEQ ID NO: 34436 - DNA, 20 bp, Artificial Sequence
  Synthetic
cttttagcccaaagaaactg

SEQ ID NO: 34437 - DNA, 20 bp, Artificial Sequence
  Synthetic
cgagacaccacagtttcttt

SEQ ID NO: 34438 - DNA, 20 bp, Artificial Sequence
  Synthetic
acgagacaccacagtttctt

SEQ ID NO: 34439 - DNA, 20 bp, Artificial Sequence
  Synthetic
aagaaactgtggtgtctcgt

SEQ ID NO: 34440 - DNA, 20 bp, Artificial Sequence
  Synthetic
ctcgttggcgtgctgatccc

SEQ ID NO: 34441 - DNA, 20 bp, Artificial Sequence
  Synthetic
tcgttggcgtgctgatccct

SEQ ID NO: 34442 - DNA, 20 bp, Artificial Sequence
  Synthetic
ggcgtgctgatccctgggct

SEQ ID NO: 34443 - DNA, 20 bp, Artificial Sequence
  Synthetic
gcgtgctgatccctgggctc

SEQ ID NO: 34444 - DNA, 20 bp, Artificial Sequence
  Synthetic
cgtgctgatccctgggctcg

SEQ ID NO: 34445 - DNA, 20 bp, Artificial Sequence
  Synthetic
gaataagagccccgagccca

SEQ ID NO: 34446 - DNA, 20 bp, Artificial Sequence
  Synthetic
ggaataagagccccgagccc

SEQ ID NO: 34447 - DNA, 20 bp, Artificial Sequence
  Synthetic
tcttattcctatgttgctgc

SEQ ID NO: 34448 - DNA, 20 bp, Artificial Sequence
  Synthetic
agatgatcctgcagcaacat

SEQ ID NO: 34449 - DNA, 20 bp, Artificial Sequence
  Synthetic
tatgttgctgcaggatcatc

SEQ ID NO: 34450 - DNA, 20 bp, Artificial Sequence
  Synthetic
tggaaatgactatgatttaa

SEQ ID NO: 34451 - DNA, 20 bp, Artificial Sequence
  Synthetic
atggctcagccaatcactcc

SEQ ID NO: 34452 - DNA, 20 bp, Artificial Sequence
  Synthetic
atcgaggggccaggagtgat

SEQ ID NO: 34453 - DNA, 20 bp, Artificial Sequence
  Synthetic
actcctggcccctcgattcc

SEQ ID NO: 34454 - DNA, 20 bp, Artificial Sequence
  Synthetic
gcacctggaatcgaggggcc

SEQ ID NO: 34455 - DNA, 20 bp, Artificial Sequence
  Synthetic
gtggggcacctggaatcgag

SEQ ID NO: 34456 - DNA, 20 bp, Artificial Sequence
  Synthetic
tgtggggcacctggaatcga

SEQ ID NO: 34457 - DNA, 20 bp, Artificial Sequence
  Synthetic
ctgtggggcacctggaatcg

SEQ ID NO: 34458 - DNA, 20 bp, Artificial Sequence
  Synthetic
ctcgattccaggtgccccac

SEQ ID NO: 34459 - DNA, 20 bp, Artificial Sequence
  Synthetic
cttctcacctgtggggcacc

SEQ ID NO: 34460 - DNA, 20 bp, Artificial Sequence
  Synthetic
ttgccagcttctcacctgtg

SEQ ID NO: 34461 - DNA, 20 bp, Artificial Sequence
  Synthetic
tttgccagcttctcacctgt

SEQ ID NO: 34462 - DNA, 20 bp, Artificial Sequence
  Synthetic
gtttgccagcttctcacctg

SEQ ID NO: 34463 - DNA, 20 bp, Artificial Sequence
  Synthetic
gcaaagaagagtcgtggaat

SEQ ID NO: 34464 - DNA, 20 bp, Artificial Sequence
  Synthetic
gattccacgactcttctttg

SEQ ID NO: 34465 - DNA, 20 bp, Artificial Sequence
  Synthetic
attccacgactcttctttgc

SEQ ID NO: 34466 - DNA, 20 bp, Artificial Sequence
  Synthetic
tctcccgcaaagaagagtcg

SEQ ID NO: 34467 - DNA, 20 bp, Artificial Sequence
  Synthetic
gcactgtggctgggtagtta

SEQ ID NO: 34468 - DNA, 20 bp, Artificial Sequence
  Synthetic
aactacccagccacagtgca

SEQ ID NO: 34469 - DNA, 20 bp, Artificial Sequence
  Synthetic
gagcaccatgcactgtggct

SEQ ID NO: 34470 - DNA, 20 bp, Artificial Sequence
  Synthetic
agagcaccatgcactgtggc

SEQ ID NO: 34471 - DNA, 20 bp, Artificial Sequence
  Synthetic
cagcagagcaccatgcactg

SEQ ID NO: 34472 - DNA, 20 bp, Artificial Sequence
  Synthetic
gtgcatggtgctctgctgag

SEQ ID NO: 34473 - DNA, 20 bp, Artificial Sequence
  Synthetic
tgcatggtgctctgctgagt

SEQ ID NO: 34474 - DNA, 20 bp, Artificial Sequence
  Synthetic
gctgagtgggctgcgagaag

SEQ ID NO: 34475 - DNA, 20 bp, Artificial Sequence
  Synthetic
ctgagtgggctgcgagaagc

SEQ ID NO: 34476 - DNA, 20 bp, Artificial Sequence
  Synthetic
cccaggtatctgctcgctcg

SEQ ID NO: 34477 - DNA, 20 bp, Artificial Sequence
  Synthetic
cccacgagcgagcagatacc

SEQ ID NO: 34478 - DNA, 20 bp, Artificial Sequence
  Synthetic
ccaggtatctgctcgctcgt

SEQ ID NO: 34479 - DNA, 20 bp, Artificial Sequence
  Synthetic
actgggcaaagaattcattg

SEQ ID NO: 34480 - DNA, 20 bp, Artificial Sequence
  Synthetic
gaattctttgcccagtttgc

SEQ ID NO: 34481 - DNA, 20 bp, Artificial Sequence
  Synthetic
agtgtggtcaccagcaaact

SEQ ID NO: 34482 - DNA, 20 bp, Artificial Sequence
  Synthetic
gagtgtggtcaccagcaaac

SEQ ID NO: 34483 - DNA, 20 bp, Artificial Sequence
  Synthetic
gaccacactctgctaactcc

SEQ ID NO: 34484 - DNA, 20 bp, Artificial Sequence
  Synthetic
accacactctgctaactccc

SEQ ID NO: 34485 - DNA, 20 bp, Artificial Sequence
  Synthetic
acccgggagttagcagagtg

SEQ ID NO: 34486 - DNA, 20 bp, Artificial Sequence
  Synthetic
tctgctaactcccgggtact

SEQ ID NO: 34487 - DNA, 20 bp, Artificial Sequence
  Synthetic
tcaattatcaccgagtaccc

SEQ ID NO: 34488 - DNA, 20 bp, Artificial Sequence
  Synthetic
ttcaattatcaccgagtacc

SEQ ID NO: 34489 - DNA, 20 bp, Artificial Sequence
  Synthetic
ctcggtgataattgaaaaac

SEQ ID NO: 34490 - DNA, 20 bp, Artificial Sequence
  Synthetic
ataattgaaaaactggcaga

SEQ ID NO: 34491 - DNA, 20 bp, Artificial Sequence
  Synthetic
taattgaaaaactggcagaa

SEQ ID NO: 34492 - DNA, 20 bp, Artificial Sequence
  Synthetic
gtgcagtgtattgattattc

SEQ ID NO: 34493 - DNA, 20 bp, Artificial Sequence
  Synthetic
ttattctggagatgaagtgc

SEQ ID NO: 34494 - DNA, 20 bp, Artificial Sequence
  Synthetic
gtgcaggttaccactacaga

SEQ ID NO: 34495 - DNA, 20 bp, Artificial Sequence
  Synthetic
gttaccactacagatggcac

SEQ ID NO: 34496 - DNA, 20 bp, Artificial Sequence
  Synthetic
ttaccactacagatggcaca

SEQ ID NO: 34497 - DNA, 20 bp, Artificial Sequence
  Synthetic
ataccctgtgccatctgtag

SEQ ID NO: 34498 - DNA, 20 bp, Artificial Sequence
  Synthetic
cacagggtattctgcacaaa

SEQ ID NO: 34499 - DNA, 20 bp, Artificial Sequence
  Synthetic
ggtattagtcactgtaccac

SEQ ID NO: 34500 - DNA, 20 bp, Artificial Sequence
  Synthetic
cctttctgtagtaaagccag

SEQ ID NO: 34501 - DNA, 20 bp, Artificial Sequence
  Synthetic
ccactggctttactacagaa

SEQ ID NO: 34502 - DNA, 20 bp, Artificial Sequence
  Synthetic
caacggtggattaaactgaa

SEQ ID NO: 34503 - DNA, 20 bp, Artificial Sequence
  Synthetic
atcttcttctctgacaacgg

SEQ ID NO: 34504 - DNA, 20 bp, Artificial Sequence
  Synthetic
ttcatcttcttctctgacaa

SEQ ID NO: 34505 - DNA, 20 bp, Artificial Sequence
  Synthetic
gttgtcagagaagaagatga

SEQ ID NO: 34506 - DNA, 20 bp, Artificial Sequence
  Synthetic
atgaaggctatcaacagctt

SEQ ID NO: 34507 - DNA, 20 bp, Artificial Sequence
  Synthetic
gctatcaacagcttaggcgc

SEQ ID NO: 34508 - DNA, 20 bp, Artificial Sequence
  Synthetic
aggcgcaggcatcattgaaa

SEQ ID NO: 34509 - DNA, 20 bp, Artificial Sequence
  Synthetic
aaatctatacggaaattgca

SEQ ID NO: 34510 - DNA, 20 bp, Artificial Sequence
  Synthetic
tgcaatttccgtatagattt

SEQ ID NO: 34511 - DNA, 20 bp, Artificial Sequence
  Synthetic
gcaatttccgtatagatttt

SEQ ID NO: 34512 - DNA, 20 bp, Artificial Sequence
  Synthetic
ttactgtcccaaaatctata

SEQ ID NO: 34513 - DNA, 20 bp, Artificial Sequence
  Synthetic
ttttgggacagtaaagtaca

SEQ ID NO: 34514 - DNA, 20 bp, Artificial Sequence
  Synthetic
tttgggacagtaaagtacaa

SEQ ID NO: 34515 - DNA, 20 bp, Artificial Sequence
  Synthetic
ttgggacagtaaagtacaag

SEQ ID NO: 34516 - DNA, 20 bp, Artificial Sequence
  Synthetic
gtacaaggggctgacttttt

SEQ ID NO: 34517 - DNA, 20 bp, Artificial Sequence
  Synthetic
cctcgcttgctggcactggg

SEQ ID NO: 34518 - DNA, 20 bp, Artificial Sequence
  Synthetic
cctcccagtgccagcaagcg

SEQ ID NO: 34519 - DNA, 20 bp, Artificial Sequence
  Synthetic
ctcccagtgccagcaagcga

SEQ ID NO: 34520 - DNA, 20 bp, Artificial Sequence
  Synthetic
agccctcgcttgctggcact

SEQ ID NO: 34521 - DNA, 20 bp, Artificial Sequence
  Synthetic
aagccctcgcttgctggcac

SEQ ID NO: 34522 - DNA, 20 bp, Artificial Sequence
  Synthetic
ggcaaaaagccctcgcttgc

SEQ ID NO: 34523 - DNA, 20 bp, Artificial Sequence
  Synthetic
ttttgccgtgttctatgaca

SEQ ID NO: 34524 - DNA, 20 bp, Artificial Sequence
  Synthetic
gggatccatgtcatagaaca

SEQ ID NO: 34525 - DNA, 20 bp, Artificial Sequence
  Synthetic
gttctatgacatggatcccc

SEQ ID NO: 34526 - DNA, 20 bp, Artificial Sequence
  Synthetic
ttcacgaatgattttacctg

SEQ ID NO: 34527 - DNA, 20 bp, Artificial Sequence
  Synthetic
tcagcacgctgtgcttcttc

SEQ ID NO: 34528 - DNA, 20 bp, Artificial Sequence
  Synthetic
gtgctgatgtctgtgattgc

SEQ ID NO: 34529 - DNA, 20 bp, Artificial Sequence
  Synthetic
tgctgatgtctgtgattgcc

SEQ ID NO: 34530 - DNA, 20 bp, Artificial Sequence
  Synthetic
gctgatgtctgtgattgccg

SEQ ID NO: 34531 - DNA, 20 bp, Artificial Sequence
  Synthetic
gatgtctgtgattgccgggg

SEQ ID NO: 34532 - DNA, 20 bp, Artificial Sequence
  Synthetic
cacggatgcgacagcctccc

SEQ ID NO: 34533 - DNA, 20 bp, Artificial Sequence
  Synthetic
gggaggctgtcgcatccgtg

SEQ ID NO: 34534 - DNA, 20 bp, Artificial Sequence
  Synthetic
tgtcgcatccgtgaggaccc

SEQ ID NO: 34535 - DNA, 20 bp, Artificial Sequence
  Synthetic
tttgtcatccagggtcctca

SEQ ID NO: 34536 - DNA, 20 bp, Artificial Sequence
  Synthetic
gaggaccctggatgacaaac

SEQ ID NO: 34537 - DNA, 20 bp, Artificial Sequence
  Synthetic
cagcacctgtttgtcatcca

SEQ ID NO: 34538 - DNA, 20 bp, Artificial Sequence
  Synthetic
gcagcacctgtttgtcatcc

SEQ ID NO: 34539 - DNA, 20 bp, Artificial Sequence
  Synthetic
acaggtgctgcagcagtgca

SEQ ID NO: 34540 - DNA, 20 bp, Artificial Sequence
  Synthetic
agcagtgcatggccacgctc

SEQ ID NO: 34541 - DNA, 20 bp, Artificial Sequence
  Synthetic
gcagtgcatggccacgctcc

SEQ ID NO: 34542 - DNA, 20 bp, Artificial Sequence
  Synthetic
cttgaacagctcccggagcg

SEQ ID NO: 34543 - DNA, 20 bp, Artificial Sequence
  Synthetic
cacgctccgggagctgttca

SEQ ID NO: 34544 - DNA, 20 bp, Artificial Sequence
  Synthetic
cctgctccttgaacagctcc

SEQ ID NO: 34545 - DNA, 20 bp, Artificial Sequence
  Synthetic
ccgggagctgttcaaggagc

SEQ ID NO: 34546 - DNA, 20 bp, Artificial Sequence
  Synthetic
caaaatactttgtgggatct

SEQ ID NO: 34547 - DNA, 20 bp, Artificial Sequence
  Synthetic
acaaaatactttgtgggatc

SEQ ID NO: 34548 - DNA, 20 bp, Artificial Sequence
  Synthetic
cgagtgacaaaatactttgt

SEQ ID NO: 34549 - DNA, 20 bp, Artificial Sequence
  Synthetic
ccgagtgacaaaatactttg

SEQ ID NO: 34550 - DNA, 20 bp, Artificial Sequence
  Synthetic
ccacaaagtattttgtcact

SEQ ID NO: 34551 - DNA, 20 bp, Artificial Sequence
  Synthetic
caaagtattttgtcactcgg

SEQ ID NO: 34552 - DNA, 20 bp, Artificial Sequence
  Synthetic
ctcggtggagcacagaccca

SEQ ID NO: 34553 - DNA, 20 bp, Artificial Sequence
  Synthetic
cacagacccatggatccaga

SEQ ID NO: 34554 - DNA, 20 bp, Artificial Sequence
  Synthetic
tgtatgccatctggatccat

SEQ ID NO: 34555 - DNA, 20 bp, Artificial Sequence
  Synthetic
ctgtatgccatctggatcca

SEQ ID NO: 34556 - DNA, 20 bp, Artificial Sequence
  Synthetic
tcacaaaactgtatgccatc

SEQ ID NO: 34557 - DNA, 20 bp, Artificial Sequence
  Synthetic
gcatacagttttgtgaagac

SEQ ID NO: 34558 - DNA, 20 bp, Artificial Sequence
  Synthetic
tacagttttgtgaagacagg

SEQ ID NO: 34559 - DNA, 20 bp, Artificial Sequence
  Synthetic
tttgtgaagacaggtggaag

SEQ ID NO: 34560 - DNA, 20 bp, Artificial Sequence
  Synthetic
ttgtgaagacaggtggaagt

SEQ ID NO: 34561 - DNA, 20 bp, Artificial Sequence
  Synthetic
tgtgaagacaggtggaagtg

SEQ ID NO: 34562 - DNA, 20 bp, Artificial Sequence
  Synthetic
gaagacaggtggaagtgggg

SEQ ID NO: 34563 - DNA, 20 bp, Artificial Sequence
  Synthetic
gtcttcagcaatgatatcgt

SEQ ID NO: 34564 - DNA, 20 bp, Artificial Sequence
  Synthetic
atcattgctgaagacattca

SEQ ID NO: 34565 - DNA, 20 bp, Artificial Sequence
  Synthetic
caaggaaccgtctttttcgc

SEQ ID NO: 34566 - DNA, 20 bp, Artificial Sequence
  Synthetic
aaccgtctttttcgctggtg

SEQ ID NO: 34567 - DNA, 20 bp, Artificial Sequence
  Synthetic
tacctcaccagcgaaaaaga

SEQ ID NO: 34568 - DNA, 20 bp, Artificial Sequence
  Synthetic
atgttttacaggcaacaaac

SEQ ID NO: 34569 - DNA, 20 bp, Artificial Sequence
  Synthetic
catttcccacaaactgttac

SEQ ID NO: 34570 - DNA, 20 bp, Artificial Sequence
  Synthetic
atttcccacaaactgttaca

SEQ ID NO: 34571 - DNA, 20 bp, Artificial Sequence
  Synthetic
tttcccacaaactgttacag

SEQ ID NO: 34572 - DNA, 20 bp, Artificial Sequence
  Synthetic
atgcccctgtaacagtttgt

SEQ ID NO: 34573 - DNA, 20 bp, Artificial Sequence
  Synthetic
tatgcccctgtaacagtttg

SEQ ID NO: 34574 - DNA, 20 bp, Artificial Sequence
  Synthetic
gttacaggggcatatttgag

SEQ ID NO: 34575 - DNA, 20 bp, Artificial Sequence
  Synthetic
cgattgtgtcaggagccaga

SEQ ID NO: 34576 - DNA, 20 bp, Artificial Sequence
  Synthetic
acatcgcactcgtctccgtc

SEQ ID NO: 34577 - DNA, 20 bp, Artificial Sequence
  Synthetic
aaatgcaaagcctgtgtgca

SEQ ID NO: 34578 - DNA, 20 bp, Artificial Sequence
  Synthetic
gcctgtgtgcaaggagagtg

SEQ ID NO: 34579 - DNA, 20 bp, Artificial Sequence
  Synthetic
accacactctccttgcacac

SEQ ID NO: 34580 - DNA, 20 bp, Artificial Sequence
  Synthetic
tcttcatgtctctgcagtag

SEQ ID NO: 34581 - DNA, 20 bp, Artificial Sequence
  Synthetic
tgcagagacatgaagaagtt

SEQ ID NO: 34582 - DNA, 20 bp, Artificial Sequence
  Synthetic
gcagagacatgaagaagttt

SEQ ID NO: 34583 - DNA, 20 bp, Artificial Sequence
  Synthetic
cagagacatgaagaagtttg

SEQ ID NO: 34584 - DNA, 20 bp, Artificial Sequence
  Synthetic
agagacatgaagaagtttgg

SEQ ID NO: 34585 - DNA, 20 bp, Artificial Sequence
  Synthetic
gagacatgaagaagtttggg

SEQ ID NO: 34586 - DNA, 20 bp, Artificial Sequence
  Synthetic
atgaagaagtttggggggcc

SEQ ID NO: 34587 - DNA, 20 bp, Artificial Sequence
  Synthetic
caggactgcttcatgcgtcc

SEQ ID NO: 34588 - DNA, 20 bp, Artificial Sequence
  Synthetic
caagcactgtcggaggacac

SEQ ID NO: 34589 - DNA, 20 bp, Artificial Sequence
  Synthetic
ctgtgtcctccgacagtgct

SEQ ID NO: 34590 - DNA, 20 bp, Artificial Sequence
  Synthetic
tcactgccaagcactgtcgg

SEQ ID NO: 34591 - DNA, 20 bp, Artificial Sequence
  Synthetic
cactcactgccaagcactgt

SEQ ID NO: 34592 - DNA, 20 bp, Artificial Sequence
  Synthetic
tactgtctaatgagtgttcg

SEQ ID NO: 34593 - DNA, 20 bp, Artificial Sequence
  Synthetic
ctgctatactgacttccatg

SEQ ID NO: 34594 - DNA, 20 bp, Artificial Sequence
  Synthetic
actgacttccatgtggactt

SEQ ID NO: 34595 - DNA, 20 bp, Artificial Sequence
  Synthetic
gacttccatgtggactttgg

SEQ ID NO: 34596 - DNA, 20 bp, Artificial Sequence
  Synthetic
aggtaccaccaaagtccaca

SEQ ID NO: 34597 - DNA, 20 bp, Artificial Sequence
  Synthetic
actttggtggtacctctgtt

SEQ ID NO: 34598 - DNA, 20 bp, Artificial Sequence
  Synthetic
atggatgtgataccaaacag

SEQ ID NO: 34599 - DNA, 20 bp, Artificial Sequence
  Synthetic
gtttggtatcacatccatca

SEQ ID NO: 34600 - DNA, 20 bp, Artificial Sequence
  Synthetic
tttggtatcacatccatcaa

SEQ ID NO: 34601 - DNA, 20 bp, Artificial Sequence
  Synthetic
ttggtatcacatccatcaag

SEQ ID NO: 34602 - DNA, 20 bp, Artificial Sequence
  Synthetic
tggtatcacatccatcaagg

SEQ ID NO: 34603 - DNA, 20 bp, Artificial Sequence
  Synthetic
tcacatccatcaagggggaa

SEQ ID NO: 34604 - DNA, 20 bp, Artificial Sequence
  Synthetic
accatacctttcccccttga

SEQ ID NO: 34605 - DNA, 20 bp, Artificial Sequence
  Synthetic
tttttaactcacaggtcttc

SEQ ID NO: 34606 - DNA, 20 bp, Artificial Sequence
  Synthetic
ccaggttgtgggctgtaggg

SEQ ID NO: 34607 - DNA, 20 bp, Artificial Sequence
  Synthetic
cccccctacagcccacaacc

SEQ ID NO: 34608 - DNA, 20 bp, Artificial Sequence
  Synthetic
tccaggttgtgggctgtagg

SEQ ID NO: 34609 - DNA, 20 bp, Artificial Sequence
  Synthetic
ctccaggttgtgggctgtag

SEQ ID NO: 34610 - DNA, 20 bp, Artificial Sequence
  Synthetic
gctccaggttgtgggctgta

SEQ ID NO: 34611 - DNA, 20 bp, Artificial Sequence
  Synthetic
agctccaggttgtgggctgt

SEQ ID NO: 34612 - DNA, 20 bp, Artificial Sequence
  Synthetic
ctcgtacagctccaggttgt

SEQ ID NO: 34613 - DNA, 20 bp, Artificial Sequence
  Synthetic
tctcgtacagctccaggttg

SEQ ID NO: 34614 - DNA, 20 bp, Artificial Sequence
  Synthetic
acctggagctgtacgagaat

SEQ ID NO: 34615 - DNA, 20 bp, Artificial Sequence
  Synthetic
gccaattctcgtacagctcc

SEQ ID NO: 34616 - DNA, 20 bp, Artificial Sequence
  Synthetic
tacgagaattggctgctgtc

SEQ ID NO: 34617 - DNA, 20 bp, Artificial Sequence
  Synthetic
acgagaattggctgctgtca

SEQ ID NO: 34618 - DNA, 20 bp, Artificial Sequence
  Synthetic
ttggctgctgtcagggaaac

SEQ ID NO: 34619 - DNA, 20 bp, Artificial Sequence
  Synthetic
tggctgctgtcagggaaaca

SEQ ID NO: 34620 - DNA, 20 bp, Artificial Sequence
  Synthetic
gaaacagggagacatctttc

SEQ ID NO: 34621 - DNA, 20 bp, Artificial Sequence
  Synthetic
aaacagggagacatctttct

SEQ ID NO: 34622 - DNA, 20 bp, Artificial Sequence
  Synthetic
gagacatctttctgggtgac

SEQ ID NO: 34623 - DNA, 20 bp, Artificial Sequence
  Synthetic
agacatctttctgggtgacc

SEQ ID NO: 34624 - DNA, 20 bp, Artificial Sequence
  Synthetic
tgcgctgacaatctgatacc

SEQ ID NO: 34625 - DNA, 20 bp, Artificial Sequence
  Synthetic
tcagcgcattgagctcaagc

SEQ ID NO: 34626 - DNA, 20 bp, Artificial Sequence
  Synthetic
cagcgcattgagctcaagca

SEQ ID NO: 34627 - DNA, 20 bp, Artificial Sequence
  Synthetic
tataccttcgtcattccctc

SEQ ID NO: 34628 - DNA, 20 bp, Artificial Sequence
  Synthetic
cttacctgagggaatgacga

SEQ ID NO: 34629 - DNA, 20 bp, Artificial Sequence
  Synthetic
ttcccattttgcttacctga

SEQ ID NO: 34630 - DNA, 20 bp, Artificial Sequence
  Synthetic
cttcccattttgcttacctg

SEQ ID NO: 34631 - DNA, 20 bp, Artificial Sequence
  Synthetic
ccaaacactaatgtgtctgt

SEQ ID NO: 34632 - DNA, 20 bp, Artificial Sequence
  Synthetic
cctacagacacattagtgtt

SEQ ID NO: 34633 - DNA, 20 bp, Artificial Sequence
  Synthetic
ctacagacacattagtgttt

SEQ ID NO: 34634 - DNA, 20 bp, Artificial Sequence
  Synthetic
tacagacacattagtgtttg

SEQ ID NO: 34635 - DNA, 20 bp, Artificial Sequence
  Synthetic
acagacacattagtgtttgg

SEQ ID NO: 34636 - DNA, 20 bp, Artificial Sequence
  Synthetic
ggacaacggcaggagctcgg

SEQ ID NO: 34637 - DNA, 20 bp, Artificial Sequence
  Synthetic
cggcaggagctcggcggcgc

SEQ ID NO: 34638 - DNA, 20 bp, Artificial Sequence
  Synthetic
cgcacttgcggcatcgcgtc

SEQ ID NO: 34639 - DNA, 20 bp, Artificial Sequence
  Synthetic
gacgcgatgccgcaagtgcg

SEQ ID NO: 34640 - DNA, 20 bp, Artificial Sequence
  Synthetic
gcaggcaggcctcgcacttg

SEQ ID NO: 34641 - DNA, 20 bp, Artificial Sequence
  Synthetic
gcaagtgcgaggcctgcctg

SEQ ID NO: 34642 - DNA, 20 bp, Artificial Sequence
  Synthetic
gcctgcctgcggaccgagtg

SEQ ID NO: 34643 - DNA, 20 bp, Artificial Sequence
  Synthetic
tccgcactcggtccgcaggc

SEQ ID NO: 34644 - DNA, 20 bp, Artificial Sequence
  Synthetic
actctccgcactcggtccgc

SEQ ID NO: 34645 - DNA, 20 bp, Artificial Sequence
  Synthetic
gaagtggcactctccgcact

SEQ ID NO: 34646 - DNA, 20 bp, Artificial Sequence
  Synthetic
cggagagtgccacttctgca

SEQ ID NO: 34647 - DNA, 20 bp, Artificial Sequence
  Synthetic
tcttcatgtccttgcagaag

SEQ ID NO: 34648 - DNA, 20 bp, Artificial Sequence
  Synthetic
tgcaaggacatgaagaagtt

SEQ ID NO: 34649 - DNA, 20 bp, Artificial Sequence
  Synthetic
gcaaggacatgaagaagttc

SEQ ID NO: 34650 - DNA, 20 bp, Artificial Sequence
  Synthetic
caaggacatgaagaagttcg

SEQ ID NO: 34651 - DNA, 20 bp, Artificial Sequence
  Synthetic
aaggacatgaagaagttcgg

SEQ ID NO: 34652 - DNA, 20 bp, Artificial Sequence
  Synthetic
atgaagaagttcgggggccc

SEQ ID NO: 34653 - DNA, 20 bp, Artificial Sequence
  Synthetic
tgaagaagttcgggggcccc

SEQ ID NO: 34654 - DNA, 20 bp, Artificial Sequence
  Synthetic
agctctgcttcatgcgcccg

SEQ ID NO: 34655 - DNA, 20 bp, Artificial Sequence
  Synthetic
cagctctgcttcatgcgccc

SEQ ID NO: 34656 - DNA, 20 bp, Artificial Sequence
  Synthetic
gcagctctgcttcatgcgcc

SEQ ID NO: 34657 - DNA, 20 bp, Artificial Sequence
  Synthetic
tgaagcagagctgcatcatg

SEQ ID NO: 34658 - DNA, 20 bp, Artificial Sequence
  Synthetic
acaataaagcgatttattga

SEQ ID NO: 34659 - DNA, 20 bp, Artificial Sequence
  Synthetic
attgaaggaaaagagaagcc

SEQ ID NO: 34660 - DNA, 20 bp, Artificial Sequence
  Synthetic
aagagaagccaggagcactg

SEQ ID NO: 34661 - DNA, 20 bp, Artificial Sequence
  Synthetic
tatatgtgccacagtgctcc

SEQ ID NO: 34662 - DNA, 20 bp, Artificial Sequence
  Synthetic
gtggcacatatatgctgcaa

SEQ ID NO: 34663 - DNA, 20 bp, Artificial Sequence
  Synthetic
catatatgctgcaaaggaca

SEQ ID NO: 34664 - DNA, 20 bp, Artificial Sequence
  Synthetic
caaaggacacggagaagata

SEQ ID NO: 34665 - DNA, 20 bp, Artificial Sequence
  Synthetic
aaaggacacggagaagataa

SEQ ID NO: 34666 - DNA, 20 bp, Artificial Sequence
  Synthetic
gataagggaatttcttaaaa

SEQ ID NO: 34667 - DNA, 20 bp, Artificial Sequence
  Synthetic
ttctaggtatcagaagagca

SEQ ID NO: 34668 - DNA, 20 bp, Artificial Sequence
  Synthetic
gaataggatcgtggtctgct

SEQ ID NO: 34669 - DNA, 20 bp, Artificial Sequence
  Synthetic
tgaataggatcgtggtctgc

SEQ ID NO: 34670 - DNA, 20 bp, Artificial Sequence
  Synthetic
tttgatcatgaataggatcg

SEQ ID NO: 34671 - DNA, 20 bp, Artificial Sequence
  Synthetic
atcctattcatgatcaaagc

SEQ ID NO: 34672 - DNA, 20 bp, Artificial Sequence
  Synthetic
taccagctttgatcatgaat

SEQ ID NO: 34673 - DNA, 20 bp, Artificial Sequence
  Synthetic
gaagacgttttcttaatgat

SEQ ID NO: 34674 - DNA, 20 bp, Artificial Sequence
  Synthetic
aaacgtcttcatcaagagta

SEQ ID NO: 34675 - DNA, 20 bp, Artificial Sequence
  Synthetic
catcaagagtatggagttca

SEQ ID NO: 34676 - DNA, 20 bp, Artificial Sequence
  Synthetic
aagagtatggagttcaaggc

SEQ ID NO: 34677 - DNA, 20 bp, Artificial Sequence
  Synthetic
agagtatggagttcaaggct

SEQ ID NO: 34678 - DNA, 20 bp, Artificial Sequence
  Synthetic
tgggctattgtacagtttct

SEQ ID NO: 34679 - DNA, 20 bp, Artificial Sequence
  Synthetic
gggctattgtacagtttctt

SEQ ID NO: 34680 - DNA, 20 bp, Artificial Sequence
  Synthetic
ggctattgtacagtttcttg

SEQ ID NO: 34681 - DNA, 20 bp, Artificial Sequence
  Synthetic
tgtacagtttcttggggatg

SEQ ID NO: 34682 - DNA, 20 bp, Artificial Sequence
  Synthetic
tggggatgtggtgtttatcc

SEQ ID NO: 34683 - DNA, 20 bp, Artificial Sequence
  Synthetic
gatgtggtgtttatcccggc

SEQ ID NO: 34684 - DNA, 20 bp, Artificial Sequence
  Synthetic
cctgatgtggagctcctgcc

SEQ ID NO: 34685 - DNA, 20 bp, Artificial Sequence
  Synthetic
cccggcaggagctccacatc

SEQ ID NO: 34686 - DNA, 20 bp, Artificial Sequence
  Synthetic
gcctgatgtggagctcctgc

SEQ ID NO: 34687 - DNA, 20 bp, Artificial Sequence
  Synthetic
gtaatgattcttgcctgatg

SEQ ID NO: 34688 - DNA, 20 bp, Artificial Sequence
  Synthetic
cttatatagctgcatcaaag

SEQ ID NO: 34689 - DNA, 20 bp, Artificial Sequence
  Synthetic
ccgatgaggtgacgaagcag

SEQ ID NO: 34690 - DNA, 20 bp, Artificial Sequence
  Synthetic
acgaagcagaggattcatga

SEQ ID NO: 34691 - DNA, 20 bp, Artificial Sequence
  Synthetic
catgatggaaaagagaagcc

SEQ ID NO: 34692 - DNA, 20 bp, Artificial Sequence
  Synthetic
aagagaagccaggtgcttta

SEQ ID NO: 34693 - DNA, 20 bp, Artificial Sequence
  Synthetic
tagatgtgccataaagcacc

SEQ ID NO: 34694 - DNA, 20 bp, Artificial Sequence
  Synthetic
atggcacatctatgcagcca

SEQ ID NO: 34695 - DNA, 20 bp, Artificial Sequence
  Synthetic
ccggatcttctctgcatcct

SEQ ID NO: 34696 - DNA, 20 bp, Artificial Sequence
  Synthetic
ccaaggatgcagagaagatc

SEQ ID NO: 34697 - DNA, 20 bp, Artificial Sequence
  Synthetic
caaggatgcagagaagatcc

SEQ ID NO: 34698 - DNA, 20 bp, Artificial Sequence
  Synthetic
gatccgggagctgctccgaa

SEQ ID NO: 34699 - DNA, 20 bp, Artificial Sequence
  Synthetic
gtacctttcggagcagctcc

SEQ ID NO: 34700 - DNA, 20 bp, Artificial Sequence
  Synthetic
ccacccaggggcgtaccttt

SEQ ID NO: 34701 - DNA, 20 bp, Artificial Sequence
  Synthetic
cttcaggttggagaagaaca

SEQ ID NO: 34702 - DNA, 20 bp, Artificial Sequence
  Synthetic
catgatcaggggggttctct

SEQ ID NO: 34703 - DNA, 20 bp, Artificial Sequence
  Synthetic
gaattgggtcatgatcaggg

SEQ ID NO: 34704 - DNA, 20 bp, Artificial Sequence
  Synthetic
tgaattgggtcatgatcagg

SEQ ID NO: 34705 - DNA, 20 bp, Artificial Sequence
  Synthetic
atgaattgggtcatgatcag

SEQ ID NO: 34706 - DNA, 20 bp, Artificial Sequence
  Synthetic
catgaattgggtcatgatca

SEQ ID NO: 34707 - DNA, 20 bp, Artificial Sequence
  Synthetic
tcatgaattgggtcatgatc

SEQ ID NO: 34708 - DNA, 20 bp, Artificial Sequence
  Synthetic
acccaattcatgaccaaagt

SEQ ID NO: 34709 - DNA, 20 bp, Artificial Sequence
  Synthetic
accaactttggtcatgaatt

SEQ ID NO: 34710 - DNA, 20 bp, Artificial Sequence
  Synthetic
taccaactttggtcatgaat

SEQ ID NO: 34711 - DNA, 20 bp, Artificial Sequence
  Synthetic
tcatgaccaaagttggtacc

SEQ ID NO: 34712 - DNA, 20 bp, Artificial Sequence
  Synthetic
tctggtccaggtaccaactt

SEQ ID NO: 34713 - DNA, 20 bp, Artificial Sequence
  Synthetic
gcttacggagggtctggtcc

SEQ ID NO: 34714 - DNA, 20 bp, Artificial Sequence
  Synthetic
agagtcgcttacggagggtc

SEQ ID NO: 34715 - DNA, 20 bp, Artificial Sequence
  Synthetic
ctcatagagtcgcttacgga

SEQ ID NO: 34716 - DNA, 20 bp, Artificial Sequence
  Synthetic
cctcatagagtcgcttacgg

SEQ ID NO: 34717 - DNA, 20 bp, Artificial Sequence
  Synthetic
cctccgtaagcgactctatg

SEQ ID NO: 34718 - DNA, 20 bp, Artificial Sequence
  Synthetic
actcctcatagagtcgctta

SEQ ID NO: 34719 - DNA, 20 bp, Artificial Sequence
  Synthetic
aagcgactctatgaggagta

SEQ ID NO: 34720 - DNA, 20 bp, Artificial Sequence
  Synthetic
tatgaggagtatggcgtgca

SEQ ID NO: 34721 - DNA, 20 bp, Artificial Sequence
  Synthetic
aggagtatggcgtgcaaggc

SEQ ID NO: 34722 - DNA, 20 bp, Artificial Sequence
  Synthetic
ggagtatggcgtgcaaggct

SEQ ID NO: 34723 - DNA, 20 bp, Artificial Sequence
  Synthetic
tgggctattgtgcagttcct

SEQ ID NO: 34724 - DNA, 20 bp, Artificial Sequence
  Synthetic
gtatgaaaacagcatcacct

SEQ ID NO: 34725 - DNA, 20 bp, Artificial Sequence
  Synthetic
gatgctgttttcatacctgc

SEQ ID NO: 34726 - DNA, 20 bp, Artificial Sequence
  Synthetic
acctgctggagccccacacc

SEQ ID NO: 34727 - DNA, 20 bp, Artificial Sequence
  Synthetic
acctggtgtggggctccagc

SEQ ID NO: 34728 - DNA, 20 bp, Artificial Sequence
  Synthetic
tgctggagccccacaccagg

SEQ ID NO: 34729 - DNA, 20 bp, Artificial Sequence
  Synthetic
gctggagccccacaccaggt

SEQ ID NO: 34730 - DNA, 20 bp, Artificial Sequence
  Synthetic
gcaggaacccacctggtgtg

SEQ ID NO: 34731 - DNA, 20 bp, Artificial Sequence
  Synthetic
agcaggaacccacctggtgt

SEQ ID NO: 34732 - DNA, 20 bp, Artificial Sequence
  Synthetic
aagcaggaacccacctggtg

SEQ ID NO: 34733 - DNA, 20 bp, Artificial Sequence
  Synthetic
aacaccccatacctgtactt

SEQ ID NO: 34734 - DNA, 20 bp, Artificial Sequence
  Synthetic
catgccaaagtacaggtatg

SEQ ID NO: 34735 - DNA, 20 bp, Artificial Sequence
  Synthetic
acatgccaaagtacaggtat

SEQ ID NO: 34736 - DNA, 20 bp, Artificial Sequence
  Synthetic
cacatgccaaagtacaggta

SEQ ID NO: 34737 - DNA, 20 bp, Artificial Sequence
  Synthetic
catacctgtactttggcatg

SEQ ID NO: 34738 - DNA, 20 bp, Artificial Sequence
  Synthetic
tcttccacatgccaaagtac

SEQ ID NO: 34739 - DNA, 20 bp, Artificial Sequence
  Synthetic
tgtggaagacatcctttgct

SEQ ID NO: 34740 - DNA, 20 bp, Artificial Sequence
  Synthetic
gtcttcagtgtgccaagcaa

SEQ ID NO: 34741 - DNA, 20 bp, Artificial Sequence
  Synthetic
tgcttggcacactgaagaca

SEQ ID NO: 34742 - DNA, 20 bp, Artificial Sequence
  Synthetic
gcaggtagttgatgctgtag

SEQ ID NO: 34743 - DNA, 20 bp, Artificial Sequence
  Synthetic
agcatcaactacctgcactt

SEQ ID NO: 34744 - DNA, 20 bp, Artificial Sequence
  Synthetic
actttggttctccaaagtgc

SEQ ID NO: 34745 - DNA, 20 bp, Artificial Sequence
  Synthetic
actttggagaaccaaagtcc

SEQ ID NO: 34746 - DNA, 20 bp, Artificial Sequence
  Synthetic
ggcagactgtaccaggactt

SEQ ID NO: 34747 - DNA, 20 bp, Artificial Sequence
  Synthetic
tactctgttccacctgagca

SEQ ID NO: 34748 - DNA, 20 bp, Artificial Sequence
  Synthetic
ttccacctgagcatggaaag

SEQ ID NO: 34749 - DNA, 20 bp, Artificial Sequence
  Synthetic
aaccgctttccatgctcagg

SEQ ID NO: 34750 - DNA, 20 bp, Artificial Sequence
  Synthetic
acctgagcatggaaagcggt

SEQ ID NO: 34751 - DNA, 20 bp, Artificial Sequence
  Synthetic
tccaaccgctttccatgctc

SEQ ID NO: 34752 - DNA, 20 bp, Artificial Sequence
  Synthetic
cggttggaacgcctcgccaa

SEQ ID NO: 34753 - DNA, 20 bp, Artificial Sequence
  Synthetic
gagacacagtacctttggcg

SEQ ID NO: 34754 - DNA, 20 bp, Artificial Sequence
  Synthetic
cagaagagacacagtacctt

SEQ ID NO: 34755 - DNA, 20 bp, Artificial Sequence
  Synthetic
aattaaataggctttttccc

SEQ ID NO: 34756 - DNA, 20 bp, Artificial Sequence
  Synthetic
cacagctttgagcacttcct

SEQ ID NO: 34757 - DNA, 20 bp, Artificial Sequence
  Synthetic
tcacagctttgagcacttcc

SEQ ID NO: 34758 - DNA, 20 bp, Artificial Sequence
  Synthetic
aggaagtgctcaaagctgtg

SEQ ID NO: 34759 - DNA, 20 bp, Artificial Sequence
  Synthetic
aaatcagggtcatcttgtgg

SEQ ID NO: 34760 - DNA, 20 bp, Artificial Sequence
  Synthetic
gggaaatcagggtcatcttg

SEQ ID NO: 34761 - DNA, 20 bp, Artificial Sequence
  Synthetic
cagcattaacggggaaatca

SEQ ID NO: 34762 - DNA, 20 bp, Artificial Sequence
  Synthetic
tcagcattaacggggaaatc

SEQ ID NO: 34763 - DNA, 20 bp, Artificial Sequence
  Synthetic
atatttcttcagcattaacg

SEQ ID NO: 34764 - DNA, 20 bp, Artificial Sequence
  Synthetic
catatttcttcagcattaac

SEQ ID NO: 34765 - DNA, 20 bp, Artificial Sequence
  Synthetic
ccatatttcttcagcattaa

SEQ ID NO: 34766 - DNA, 20 bp, Artificial Sequence
  Synthetic
ccgttaatgctgaagaaata

SEQ ID NO: 34767 - DNA, 20 bp, Artificial Sequence
  Synthetic
atatggaattccctttgaca

SEQ ID NO: 34768 - DNA, 20 bp, Artificial Sequence
  Synthetic
catcagctcaccttgtcaaa

SEQ ID NO: 34769 - DNA, 20 bp, Artificial Sequence
  Synthetic
acatcagctcaccttgtcaa

SEQ ID NO: 34770 - DNA, 20 bp, Artificial Sequence
  Synthetic
tcttgttcaggtgactcaag

SEQ ID NO: 34771 - DNA, 20 bp, Artificial Sequence
  Synthetic
gttcaggtgactcaagaggc

SEQ ID NO: 34772 - DNA, 20 bp, Artificial Sequence
  Synthetic
tttatgatcactttccctta

SEQ ID NO: 34773 - DNA, 20 bp, Artificial Sequence
  Synthetic
ttcccttatggttaccatgc

SEQ ID NO: 34774 - DNA, 20 bp, Artificial Sequence
  Synthetic
agccggcatggtaaccataa

SEQ ID NO: 34775 - DNA, 20 bp, Artificial Sequence
  Synthetic
aagccggcatggtaaccata

SEQ ID NO: 34776 - DNA, 20 bp, Artificial Sequence
  Synthetic
taccatgccggctttaacca

SEQ ID NO: 34777 - DNA, 20 bp, Artificial Sequence
  Synthetic
aaccatggttaaagccggca

SEQ ID NO: 34778 - DNA, 20 bp, Artificial Sequence
  Synthetic
gttaaaaccatggttaaagc

SEQ ID NO: 34779 - DNA, 20 bp, Artificial Sequence
  Synthetic
taaccatggttttaactgtg

SEQ ID NO: 34780 - DNA, 20 bp, Artificial Sequence
  Synthetic
actccgcacagttaaaacca

SEQ ID NO: 34781 - DNA, 20 bp, Artificial Sequence
  Synthetic
ccaccgacgggtagcaaaat

SEQ ID NO: 34782 - DNA, 20 bp, Artificial Sequence
  Synthetic
aatgaccttttatccaacta

SEQ ID NO: 34783 - DNA, 20 bp, Artificial Sequence
  Synthetic
ctcttccatagttggataaa

SEQ ID NO: 34784 - DNA, 20 bp, Artificial Sequence
  Synthetic
tttcggaactcttccatagt

SEQ ID NO: 34785 - DNA, 20 bp, Artificial Sequence
  Synthetic
caatgtatctactgaagttt

SEQ ID NO: 34786 - DNA, 20 bp, Artificial Sequence
  Synthetic
attgcctacattgaatccca

SEQ ID NO: 34787 - DNA, 20 bp, Artificial Sequence
  Synthetic
agctccttgggattcaatgt

SEQ ID NO: 34788 - DNA, 20 bp, Artificial Sequence
  Synthetic
ttgaatcccaaggagctcat

SEQ ID NO: 34789 - DNA, 20 bp, Artificial Sequence
  Synthetic
tgaatcccaaggagctcatc

SEQ ID NO: 34790 - DNA, 20 bp, Artificial Sequence
  Synthetic
tcccaaggagctcatcgggc

SEQ ID NO: 34791 - DNA, 20 bp, Artificial Sequence
  Synthetic
ccctgcccgatgagctcctt

SEQ ID NO: 34792 - DNA, 20 bp, Artificial Sequence
  Synthetic
cccaaggagctcatcgggca

SEQ ID NO: 34793 - DNA, 20 bp, Artificial Sequence
  Synthetic
gccctgcccgatgagctcct

SEQ ID NO: 34794 - DNA, 20 bp, Artificial Sequence
  Synthetic
tcatcgggcagggctagcca

SEQ ID NO: 34795 - DNA, 20 bp, Artificial Sequence
  Synthetic
aacacgccctacctgtactt

SEQ ID NO: 34796 - DNA, 20 bp, Artificial Sequence
  Synthetic
cacatgccgaagtacaggta

SEQ ID NO: 34797 - DNA, 20 bp, Artificial Sequence
  Synthetic
ccacatgccgaagtacaggt

SEQ ID NO: 34798 - DNA, 20 bp, Artificial Sequence
  Synthetic
cctacctgtacttcggcatg

SEQ ID NO: 34799 - DNA, 20 bp, Artificial Sequence
  Synthetic
tcttccacatgccgaagtac

SEQ ID NO: 34800 - DNA, 20 bp, Artificial Sequence
  Synthetic
tgtggaagaccaccttcgcc

SEQ ID NO: 34801 - DNA, 20 bp, Artificial Sequence
  Synthetic
ctcggtgtgccaggcgaagg

SEQ ID NO: 34802 - DNA, 20 bp, Artificial Sequence
  Synthetic
caccttcgcctggcacaccg

SEQ ID NO: 34803 - DNA, 20 bp, Artificial Sequence
  Synthetic
gtcctcggtgtgccaggcga

SEQ ID NO: 34804 - DNA, 20 bp, Artificial Sequence
  Synthetic
cgcctggcacaccgaggaca

SEQ ID NO: 34805 - DNA, 20 bp, Artificial Sequence
  Synthetic
gtccatgtcctcggtgtgcc

SEQ ID NO: 34806 - DNA, 20 bp, Artificial Sequence
  Synthetic
gctgtacaggtccatgtcct

SEQ ID NO: 34807 - DNA, 20 bp, Artificial Sequence
  Synthetic
gcaggtagttgatgctgtac

SEQ ID NO: 34808 - DNA, 20 bp, Artificial Sequence
  Synthetic
agcatcaactacctgcactt

SEQ ID NO: 34809 - DNA, 20 bp, Artificial Sequence
  Synthetic
gcatcaactacctgcacttt

SEQ ID NO: 34810 - DNA, 20 bp, Artificial Sequence
  Synthetic
catcaactacctgcactttg

SEQ ID NO: 34811 - DNA, 20 bp, Artificial Sequence
  Synthetic
acttaggctccccaaagtgc

SEQ ID NO: 34812 - DNA, 20 bp, Artificial Sequence
  Synthetic
actttggggagcctaagtcc

SEQ ID NO: 34813 - DNA, 20 bp, Artificial Sequence
  Synthetic
gcagacactcaccaggactt

SEQ ID NO: 34814 - DNA, 20 bp, Artificial Sequence
  Synthetic
tacgccatcccaccagagca

SEQ ID NO: 34815 - DNA, 20 bp, Artificial Sequence
  Synthetic
cttgccgtgctctggtggga

SEQ ID NO: 34816 - DNA, 20 bp, Artificial Sequence
  Synthetic
ggcgcttgccgtgctctggt

SEQ ID NO: 34817 - DNA, 20 bp, Artificial Sequence
  Synthetic
aggcgcttgccgtgctctgg

SEQ ID NO: 34818 - DNA, 20 bp, Artificial Sequence
  Synthetic
accagagcacggcaagcgcc

SEQ ID NO: 34819 - DNA, 20 bp, Artificial Sequence
  Synthetic
tccaggcgcttgccgtgctc

SEQ ID NO: 34820 - DNA, 20 bp, Artificial Sequence
  Synthetic
agcacggcaagcgcctggag

SEQ ID NO: 34821 - DNA, 20 bp, Artificial Sequence
  Synthetic
cggcaagcgcctggagcggc

SEQ ID NO: 34822 - DNA, 20 bp, Artificial Sequence
  Synthetic
cgcctggagcggctggccat

SEQ ID NO: 34823 - DNA, 20 bp, Artificial Sequence
  Synthetic
taccgatggccagccgctcc

SEQ ID NO: 34824 - DNA, 20 bp, Artificial Sequence
  Synthetic
tggagcggctggccatcggt

SEQ ID NO: 34825 - DNA, 20 bp, Artificial Sequence
  Synthetic
tcagggcaggcacctaccga

SEQ ID NO: 34826 - DNA, 20 bp, Artificial Sequence
  Synthetic
tcggccctaggcttcttccc

SEQ ID NO: 34827 - DNA, 20 bp, Artificial Sequence
  Synthetic
cggccctaggcttcttcccc

SEQ ID NO: 34828 - DNA, 20 bp, Artificial Sequence
  Synthetic
cttcttccccgggagctcgc

SEQ ID NO: 34829 - DNA, 20 bp, Artificial Sequence
  Synthetic
ttcttccccgggagctcgca

SEQ ID NO: 34830 - DNA, 20 bp, Artificial Sequence
  Synthetic
cgcagccctgcgagctcccg

SEQ ID NO: 34831 - DNA, 20 bp, Artificial Sequence
  Synthetic
tcgcagccctgcgagctccc

SEQ ID NO: 34832 - DNA, 20 bp, Artificial Sequence
  Synthetic
gtcgcagccctgcgagctcc

SEQ ID NO: 34833 - DNA, 20 bp, Artificial Sequence
  Synthetic
agggctgcgacgccttcctg

SEQ ID NO: 34834 - DNA, 20 bp, Artificial Sequence
  Synthetic
ggtcatcttatgccgcagga

SEQ ID NO: 34835 - DNA, 20 bp, Artificial Sequence
  Synthetic
tgagggtcatcttatgccgc

SEQ ID NO: 34836 - DNA, 20 bp, Artificial Sequence
  Synthetic
caggatgatgggcgagatga

SEQ ID NO: 34837 - DNA, 20 bp, Artificial Sequence
  Synthetic
tcaggatgatgggcgagatg

SEQ ID NO: 34838 - DNA, 20 bp, Artificial Sequence
  Synthetic
ccgtacttcttcaggatgat

SEQ ID NO: 34839 - DNA, 20 bp, Artificial Sequence
  Synthetic
cccatcatcctgaagaagta

SEQ ID NO: 34840 - DNA, 20 bp, Artificial Sequence
  Synthetic
cccgtacttcttcaggatga

SEQ ID NO: 34841 - DNA, 20 bp, Artificial Sequence
  Synthetic
ccatcatcctgaagaagtac

SEQ ID NO: 34842 - DNA, 20 bp, Artificial Sequence
  Synthetic
aggggatcccgtacttcttc

SEQ ID NO: 34843 - DNA, 20 bp, Artificial Sequence
  Synthetic
agtacgggatccccttcagc

SEQ ID NO: 34844 - DNA, 20 bp, Artificial Sequence
  Synthetic
gtacgggatccccttcagcc

SEQ ID NO: 34845 - DNA, 20 bp, Artificial Sequence
  Synthetic
ccgtacgcacccggctgaag

SEQ ID NO: 34846 - DNA, 20 bp, Artificial Sequence
  Synthetic
cccgtacgcacccggctgaa

SEQ ID NO: 34847 - DNA, 20 bp, Artificial Sequence
  Synthetic
acccgtacgcacccggctga

SEQ ID NO: 34848 - DNA, 20 bp, Artificial Sequence
  Synthetic
tttccctctgcagatcacgc

SEQ ID NO: 34849 - DNA, 20 bp, Artificial Sequence
  Synthetic
ccctctgcagatcacgcagg

SEQ ID NO: 34850 - DNA, 20 bp, Artificial Sequence
  Synthetic
ctgcagatcacgcaggaggc

SEQ ID NO: 34851 - DNA, 20 bp, Artificial Sequence
  Synthetic
tgcagatcacgcaggaggcc

SEQ ID NO: 34852 - DNA, 20 bp, Artificial Sequence
  Synthetic
gcagatcacgcaggaggccg

SEQ ID NO: 34853 - DNA, 20 bp, Artificial Sequence
  Synthetic
aaatgtgatcatgaattccc

SEQ ID NO: 34854 - DNA, 20 bp, Artificial Sequence
  Synthetic
ttcatgatcacatttcccta

SEQ ID NO: 34855 - DNA, 20 bp, Artificial Sequence
  Synthetic
tttccctacggctaccacgc

SEQ ID NO: 34856 - DNA, 20 bp, Artificial Sequence
  Synthetic
aagccggcgtggtagccgta

SEQ ID NO: 34857 - DNA, 20 bp, Artificial Sequence
  Synthetic
gaagccggcgtggtagccgt

SEQ ID NO: 34858 - DNA, 20 bp, Artificial Sequence
  Synthetic
taccacgccggcttcaatca

SEQ ID NO: 34859 - DNA, 20 bp, Artificial Sequence
  Synthetic
accacgccggcttcaatcac

SEQ ID NO: 34860 - DNA, 20 bp, Artificial Sequence
  Synthetic
acccgtgattgaagccggcg

SEQ ID NO: 34861 - DNA, 20 bp, Artificial Sequence
  Synthetic
gttgaacccgtgattgaagc

SEQ ID NO: 34862 - DNA, 20 bp, Artificial Sequence
  Synthetic
ccaccgcagggtggcgaagt

SEQ ID NO: 34863 - DNA, 20 bp, Artificial Sequence
  Synthetic
catgacgtttcgcccaacca

SEQ ID NO: 34864 - DNA, 20 bp, Artificial Sequence
  Synthetic
ctttaaattcttccatggtt

SEQ ID NO: 34865 - DNA, 20 bp, Artificial Sequence
  Synthetic
tctttaaattcttccatggt

SEQ ID NO: 34866 - DNA, 20 bp, Artificial Sequence
  Synthetic
gaagtctttaaattcttcca

SEQ ID NO: 34867 - DNA, 20 bp, Artificial Sequence
  Synthetic
taaagacttcaacaaatacg

SEQ ID NO: 34868 - DNA, 20 bp, Artificial Sequence
  Synthetic
cgtggcctacatagagtcgc

SEQ ID NO: 34869 - DNA, 20 bp, Artificial Sequence
  Synthetic
gtggcctacatagagtcgca

SEQ ID NO: 34870 - DNA, 20 bp, Artificial Sequence
  Synthetic
ggctccctgcgactctatgt

SEQ ID NO: 34871 - DNA, 20 bp, Artificial Sequence
  Synthetic
tagagtcgcagggagcccac

SEQ ID NO: 34872 - DNA, 20 bp, Artificial Sequence
  Synthetic
agagtcgcagggagcccacc

SEQ ID NO: 34873 - DNA, 20 bp, Artificial Sequence
  Synthetic
gtcgcagggagcccaccggg

SEQ ID NO: 34874 - DNA, 20 bp, Artificial Sequence
  Synthetic
tcgcagggagcccaccgggc

SEQ ID NO: 34875 - DNA, 20 bp, Artificial Sequence
  Synthetic
gggagcccaccgggcgggcc

SEQ ID NO: 34876 - DNA, 20 bp, Artificial Sequence
  Synthetic
cttggccaggcccgcccggt

SEQ ID NO: 34877 - DNA, 20 bp, Artificial Sequence
  Synthetic
ccttggccaggcccgcccgg

SEQ ID NO: 34878 - DNA, 20 bp, Artificial Sequence
  Synthetic
ccaccgggcgggcctggcca

SEQ ID NO: 34879 - DNA, 20 bp, Artificial Sequence
  Synthetic
ccaccttggccaggcccgcc

SEQ ID NO: 34880 - DNA, 20 bp, Artificial Sequence
  Synthetic
ccgggcgggcctggccaagg

SEQ ID NO: 34881 - DNA, 20 bp, Artificial Sequence
  Synthetic
cgggcgggcctggccaaggt

SEQ ID NO: 34882 - DNA, 20 bp, Artificial Sequence
  Synthetic
ggatgtcacccaccttggcc

SEQ ID NO: 34883 - DNA, 20 bp, Artificial Sequence
  Synthetic
aataccccatatctctattt

SEQ ID NO: 34884 - DNA, 20 bp, Artificial Sequence
  Synthetic
catgccaaaatagagatatg

SEQ ID NO: 34885 - DNA, 20 bp, Artificial Sequence
  Synthetic
acatgccaaaatagagatat

SEQ ID NO: 34886 - DNA, 20 bp, Artificial Sequence
  Synthetic
cacatgccaaaatagagata

SEQ ID NO: 34887 - DNA, 20 bp, Artificial Sequence
  Synthetic
catatctctattttggcatg

SEQ ID NO: 34888 - DNA, 20 bp, Artificial Sequence
  Synthetic
tgtggaagaccacgtttgca

SEQ ID NO: 34889 - DNA, 20 bp, Artificial Sequence
  Synthetic
ttcggtgtgccatgcaaacg

SEQ ID NO: 34890 - DNA, 20 bp, Artificial Sequence
  Synthetic
tgcatggcacaccgaagaca

SEQ ID NO: 34891 - DNA, 20 bp, Artificial Sequence
  Synthetic
gctatagaggtccatgtctt

SEQ ID NO: 34892 - DNA, 20 bp, Artificial Sequence
  Synthetic
ggagataattaatgctatag

SEQ ID NO: 34893 - DNA, 20 bp, Artificial Sequence
  Synthetic
agcattaattatctccactt

SEQ ID NO: 34894 - DNA, 20 bp, Artificial Sequence
  Synthetic
aagacttgggctctccaaag

SEQ ID NO: 34895 - DNA, 20 bp, Artificial Sequence
  Synthetic
actttggagagcccaagtct

SEQ ID NO: 34896 - DNA, 20 bp, Artificial Sequence
  Synthetic
caagtaacttgccaagactt

SEQ ID NO: 34897 - DNA, 20 bp, Artificial Sequence
  Synthetic
acaagtaacttgccaagact

SEQ ID NO: 34898 - DNA, 20 bp, Artificial Sequence
  Synthetic
ttttaggtatgctatacctc

SEQ ID NO: 34899 - DNA, 20 bp, Artificial Sequence
  Synthetic
tatgctatacctccggagca

SEQ ID NO: 34900 - DNA, 20 bp, Artificial Sequence
  Synthetic
agtcgttttccatgctccgg

SEQ ID NO: 34901 - DNA, 20 bp, Artificial Sequence
  Synthetic
tcaagtcgttttccatgctc

SEQ ID NO: 34902 - DNA, 20 bp, Artificial Sequence
  Synthetic
cgacttgaaagactagctca

SEQ ID NO: 34903 - DNA, 20 bp, Artificial Sequence
  Synthetic
tttttcccaagcagctccca

SEQ ID NO: 34904 - DNA, 20 bp, Artificial Sequence
  Synthetic
ttttcccaagcagctcccaa

SEQ ID NO: 34905 - DNA, 20 bp, Artificial Sequence
  Synthetic
cacacccttgggagctgctt

SEQ ID NO: 34906 - DNA, 20 bp, Artificial Sequence
  Synthetic
tcacacccttgggagctgct

SEQ ID NO: 34907 - DNA, 20 bp, Artificial Sequence
  Synthetic
aagaaatgcatcacaccctt

SEQ ID NO: 34908 - DNA, 20 bp, Artificial Sequence
  Synthetic
gaagaaatgcatcacaccct

SEQ ID NO: 34909 - DNA, 20 bp, Artificial Sequence
  Synthetic
gagaaatcaatgtcatcttg

SEQ ID NO: 34910 - DNA, 20 bp, Artificial Sequence
  Synthetic
ccatatttcttcaatactga

SEQ ID NO: 34911 - DNA, 20 bp, Artificial Sequence
  Synthetic
ccatcagtattgaagaaata

SEQ ID NO: 34912 - DNA, 20 bp, Artificial Sequence
  Synthetic
atatggtattccctttgaca

SEQ ID NO: 34913 - DNA, 20 bp, Artificial Sequence
  Synthetic
tactaacataccttgtcaaa

SEQ ID NO: 34914 - DNA, 20 bp, Artificial Sequence
  Synthetic
atactaacataccttgtcaa

SEQ ID NO: 34915 - DNA, 20 bp, Artificial Sequence
  Synthetic
tcctaccttgcagataaccc

SEQ ID NO: 34916 - DNA, 20 bp, Artificial Sequence
  Synthetic
taccttgcagataacccagg

SEQ ID NO: 34917 - DNA, 20 bp, Artificial Sequence
  Synthetic
ttgcagataacccaggaggc

SEQ ID NO: 34918 - DNA, 20 bp, Artificial Sequence
  Synthetic
catgaattctccagcctcct

SEQ ID NO: 34919 - DNA, 20 bp, Artificial Sequence
  Synthetic
tcatgaattctccagcctcc

SEQ ID NO: 34920 - DNA, 20 bp, Artificial Sequence
  Synthetic
ttcatgatcactttcccata

SEQ ID NO: 34921 - DNA, 20 bp, Artificial Sequence
  Synthetic
ttcccatatggctaccatgc

SEQ ID NO: 34922 - DNA, 20 bp, Artificial Sequence
  Synthetic
aaccagcatggtagccatat

SEQ ID NO: 34923 - DNA, 20 bp, Artificial Sequence
  Synthetic
aaaccagcatggtagccata

SEQ ID NO: 34924 - DNA, 20 bp, Artificial Sequence
  Synthetic
taccatgctggttttaatca

SEQ ID NO: 34925 - DNA, 20 bp, Artificial Sequence
  Synthetic
aaccatgattaaaaccagca

SEQ ID NO: 34926 - DNA, 20 bp, Artificial Sequence
  Synthetic
aatgaccttcagaccctcca

SEQ ID NO: 34927 - DNA, 20 bp, Artificial Sequence
  Synthetic
gaccttcagaccctccatgg

SEQ ID NO: 34928 - DNA, 20 bp, Artificial Sequence
  Synthetic
ctcctccatggagggtctga

SEQ ID NO: 34929 - DNA, 20 bp, Artificial Sequence
  Synthetic
gaccctccatggaggagttc

SEQ ID NO: 34930 - DNA, 20 bp, Artificial Sequence
  Synthetic
accctccatggaggagttcc

SEQ ID NO: 34931 - DNA, 20 bp, Artificial Sequence
  Synthetic
tcccggaactcctccatgga

SEQ ID NO: 34932 - DNA, 20 bp, Artificial Sequence
  Synthetic
ctcccggaactcctccatgg

SEQ ID NO: 34933 - DNA, 20 bp, Artificial Sequence
  Synthetic
gaactcccggaactcctcca

SEQ ID NO: 34934 - DNA, 20 bp, Artificial Sequence
  Synthetic
caaggtatttgttgaactcc

SEQ ID NO: 34935 - DNA, 20 bp, Artificial Sequence
  Synthetic
caacaaataccttgcataca

SEQ ID NO: 34936 - DNA, 20 bp, Artificial Sequence
  Synthetic
ctttagactccatgtatgca

SEQ ID NO: 34937 - DNA, 20 bp, Artificial Sequence
  Synthetic
cttgcatacatggagtctaa

SEQ ID NO: 34938 - DNA, 20 bp, Artificial Sequence
  Synthetic
gtctaaaggagcccatcgtg

SEQ ID NO: 34939 - DNA, 20 bp, Artificial Sequence
  Synthetic
tctaaaggagcccatcgtgc

SEQ ID NO: 34940 - DNA, 20 bp, Artificial Sequence
  Synthetic
ctttgcaagacccgcacgat

SEQ ID NO: 34941 - DNA, 20 bp, Artificial Sequence
  Synthetic
cctttgcaagacccgcacga

SEQ ID NO: 34942 - DNA, 20 bp, Artificial Sequence
  Synthetic
ccatcgtgcgggtcttgcaa

SEQ ID NO: 34943 - DNA, 20 bp, Artificial Sequence
  Synthetic
aatacaccctacttgtactt

SEQ ID NO: 34944 - DNA, 20 bp, Artificial Sequence
  Synthetic
cacatgccaaagtacaagta

SEQ ID NO: 34945 - DNA, 20 bp, Artificial Sequence
  Synthetic
ccacatgccaaagtacaagt

SEQ ID NO: 34946 - DNA, 20 bp, Artificial Sequence
  Synthetic
cctacttgtactttggcatg

SEQ ID NO: 34947 - DNA, 20 bp, Artificial Sequence
  Synthetic
tgtggaaaaccacgtttgct

SEQ ID NO: 34948 - DNA, 20 bp, Artificial Sequence
  Synthetic
ctctgtatgccaagcaaacg

SEQ ID NO: 34949 - DNA, 20 bp, Artificial Sequence
  Synthetic
cacgtttgcttggcatacag

SEQ ID NO: 34950 - DNA, 20 bp, Artificial Sequence
  Synthetic
tgcttggcatacagaggaca

SEQ ID NO: 34951 - DNA, 20 bp, Artificial Sequence
  Synthetic
gcaggtagttgatgctgtaa

SEQ ID NO: 34952 - DNA, 20 bp, Artificial Sequence
  Synthetic
agcatcaactacctgcacct

SEQ ID NO: 34953 - DNA, 20 bp, Artificial Sequence
  Synthetic
gcatcaactacctgcacctt

SEQ ID NO: 34954 - DNA, 20 bp, Artificial Sequence
  Synthetic
catcaactacctgcaccttg

SEQ ID NO: 34955 - DNA, 20 bp, Artificial Sequence
  Synthetic
ttttgggctccccaaggtgc

SEQ ID NO: 34956 - DNA, 20 bp, Artificial Sequence
  Synthetic
accttggggagcccaaaact

SEQ ID NO: 34957 - DNA, 20 bp, Artificial Sequence
  Synthetic
accaagttttgggctcccca

SEQ ID NO: 34958 - DNA, 20 bp, Artificial Sequence
  Synthetic
ggagcccaaaacttggtatg

SEQ ID NO: 34959 - DNA, 20 bp, Artificial Sequence
  Synthetic
ggcaccacataccaagtttt

SEQ ID NO: 34960 - DNA, 20 bp, Artificial Sequence
  Synthetic
gggcaccacataccaagttt

SEQ ID NO: 34961 - DNA, 20 bp, Artificial Sequence
  Synthetic
tatgtggtgcccccagaaca

SEQ ID NO: 34962 - DNA, 20 bp, Artificial Sequence
  Synthetic
aggcgctggccatgttctgg

SEQ ID NO: 34963 - DNA, 20 bp, Artificial Sequence
  Synthetic
caggcgctggccatgttctg

SEQ ID NO: 34964 - DNA, 20 bp, Artificial Sequence
  Synthetic
ccaggcgctggccatgttct

SEQ ID NO: 34965 - DNA, 20 bp, Artificial Sequence
  Synthetic
cccagaacatggccagcgcc

SEQ ID NO: 34966 - DNA, 20 bp, Artificial Sequence
  Synthetic
tccaggcgctggccatgttc

SEQ ID NO: 34967 - DNA, 20 bp, Artificial Sequence
  Synthetic
tggccagcgcctggaacgcc

SEQ ID NO: 34968 - DNA, 20 bp, Artificial Sequence
  Synthetic
tggccaggcgttccaggcgc

SEQ ID NO: 34969 - DNA, 20 bp, Artificial Sequence
  Synthetic
agcgcctggaacgcctggcc

SEQ ID NO: 34970 - DNA, 20 bp, Artificial Sequence
  Synthetic
gcgcctggaacgcctggcca

SEQ ID NO: 34971 - DNA, 20 bp, Artificial Sequence
  Synthetic
gctccctggccaggcgttcc

SEQ ID NO: 34972 - DNA, 20 bp, Artificial Sequence
  Synthetic
ctgggaagagctccctggcc

SEQ ID NO: 34973 - DNA, 20 bp, Artificial Sequence
  Synthetic
ctggccagggagctcttccc

SEQ ID NO: 34974 - DNA, 20 bp, Artificial Sequence
  Synthetic
actgcctgggaagagctccc

SEQ ID NO: 34975 - DNA, 20 bp, Artificial Sequence
  Synthetic
agctcttcccaggcagttcc

SEQ ID NO: 34976 - DNA, 20 bp, Artificial Sequence
  Synthetic
gctcttcccaggcagttccc

SEQ ID NO: 34977 - DNA, 20 bp, Artificial Sequence
  Synthetic
ctcttcccaggcagttcccg

SEQ ID NO: 34978 - DNA, 20 bp, Artificial Sequence
  Synthetic
cacaaccccgggaactgcct

SEQ ID NO: 34979 - DNA, 20 bp, Artificial Sequence
  Synthetic
ccacaaccccgggaactgcc

SEQ ID NO: 34980 - DNA, 20 bp, Artificial Sequence
  Synthetic
ccaggcagttcccggggttg

SEQ ID NO: 34981 - DNA, 20 bp, Artificial Sequence
  Synthetic
caggcagttcccggggttgt

SEQ ID NO: 34982 - DNA, 20 bp, Artificial Sequence
  Synthetic
aggcagttcccggggttgtg

SEQ ID NO: 34983 - DNA, 20 bp, Artificial Sequence
  Synthetic
caggaaggccccacaacccc

SEQ ID NO: 34984 - DNA, 20 bp, Artificial Sequence
  Synthetic
gcaggaaggccccacaaccc

SEQ ID NO: 34985 - DNA, 20 bp, Artificial Sequence
  Synthetic
ggggttgtggggccttcctg

SEQ ID NO: 34986 - DNA, 20 bp, Artificial Sequence
  Synthetic
tggggccttcctgcggcaca

SEQ ID NO: 34987 - DNA, 20 bp, Artificial Sequence
  Synthetic
ggccttcctgcggcacaagg

SEQ ID NO: 34988 - DNA, 20 bp, Artificial Sequence
  Synthetic
ggccaccttgtgccgcagga

SEQ ID NO: 34989 - DNA, 20 bp, Artificial Sequence
  Synthetic
tgagggccaccttgtgccgc

SEQ ID NO: 34990 - DNA, 20 bp, Artificial Sequence
  Synthetic
gagaactgtaggcgagatga

SEQ ID NO: 34991 - DNA, 20 bp, Artificial Sequence
  Synthetic
tgagaactgtaggcgagatg

SEQ ID NO: 34992 - DNA, 20 bp, Artificial Sequence
  Synthetic
catctcgcctacagttctca

SEQ ID NO: 34993 - DNA, 20 bp, Artificial Sequence
  Synthetic
ccattttccttgagaactgt

SEQ ID NO: 34994 - DNA, 20 bp, Artificial Sequence
  Synthetic
cctacagttctcaaggaaaa

SEQ ID NO: 34995 - DNA, 20 bp, Artificial Sequence
  Synthetic
ctacagttctcaaggaaaat

SEQ ID NO: 34996 - DNA, 20 bp, Artificial Sequence
  Synthetic
tcccttcaatcgcataactc

SEQ ID NO: 34997 - DNA, 20 bp, Artificial Sequence
  Synthetic
tcctgagttatgcgattgaa

SEQ ID NO: 34998 - DNA, 20 bp, Artificial Sequence
  Synthetic
ctcctgagttatgcgattga

SEQ ID NO: 34999 - DNA, 20 bp, Artificial Sequence
  Synthetic
cttcaatcgcataactcagg

SEQ ID NO: 35000 - DNA, 20 bp, Artificial Sequence
  Synthetic
aatcgcataactcaggaggc

SEQ ID NO: 35001 - DNA, 20 bp, Artificial Sequence
  Synthetic
tcaggaggctggagagttca

SEQ ID NO: 35002 - DNA, 20 bp, Artificial Sequence
  Synthetic
ttcatggtgacctttcccta

SEQ ID NO: 35003 - DNA, 20 bp, Artificial Sequence
  Synthetic
agcatggtagccatagggaa

SEQ ID NO: 35004 - DNA, 20 bp, Artificial Sequence
  Synthetic
tttccctatggctaccatgc

SEQ ID NO: 35005 - DNA, 20 bp, Artificial Sequence
  Synthetic
aagccagcatggtagccata

SEQ ID NO: 35006 - DNA, 20 bp, Artificial Sequence
  Synthetic
gaagccagcatggtagccat

SEQ ID NO: 35007 - DNA, 20 bp, Artificial Sequence
  Synthetic
taccatgctggcttcaacca

SEQ ID NO: 35008 - DNA, 20 bp, Artificial Sequence
  Synthetic
aaccatggttgaagccagca

SEQ ID NO: 35009 - DNA, 20 bp, Artificial Sequence
  Synthetic
cctctgcgcagttgaaacca

SEQ ID NO: 35010 - DNA, 20 bp, Artificial Sequence
  Synthetic
ccatggtttcaactgcgcag

SEQ ID NO: 35011 - DNA, 20 bp, Artificial Sequence
  Synthetic
tcgcggagtggcaaaattga

SEQ ID NO: 35012 - DNA, 20 bp, Artificial Sequence
  Synthetic
tcattaaactcttctttggt

SEQ ID NO: 35013 - DNA, 20 bp, Artificial Sequence
  Synthetic
aaaatcattaaactcttctt

SEQ ID NO: 35014 - DNA, 20 bp, Artificial Sequence
  Synthetic
tgataaatatattgcttaca

SEQ ID NO: 35015 - DNA, 20 bp, Artificial Sequence
  Synthetic
attgcttacatggaatccca

SEQ ID NO: 35016 - DNA, 20 bp, Artificial Sequence
  Synthetic
tcccaaggtgcacacagagc

SEQ ID NO: 35017 - DNA, 20 bp, Artificial Sequence
  Synthetic
gccagctctgtgtgcacctt

SEQ ID NO: 35018 - DNA, 20 bp, Artificial Sequence
  Synthetic
agccagctctgtgtgcacct

SEQ ID NO: 35019 - DNA, 20 bp, Artificial Sequence
  Synthetic
aggtgcacacagagctggct

SEQ ID NO: 35020 - DNA, 20 bp, Artificial Sequence
  Synthetic
aacacaccctacctgtactt

SEQ ID NO: 35021 - DNA, 20 bp, Artificial Sequence
  Synthetic
cacatgccaaagtacaggta

SEQ ID NO: 35022 - DNA, 20 bp, Artificial Sequence
  Synthetic
ccacatgccaaagtacaggt

SEQ ID NO: 35023 - DNA, 20 bp, Artificial Sequence
  Synthetic
cctacctgtactttggcatg

SEQ ID NO: 35024 - DNA, 20 bp, Artificial Sequence
  Synthetic
tcttccacatgccaaagtac

SEQ ID NO: 35025 - DNA, 20 bp, Artificial Sequence
  Synthetic
tgtggaagaccacgtttgcc

SEQ ID NO: 35026 - DNA, 20 bp, Artificial Sequence
  Synthetic
ctctgtgtgccaggcaaacg

SEQ ID NO: 35027 - DNA, 20 bp, Artificial Sequence
  Synthetic
cacgtttgcctggcacacag

SEQ ID NO: 35028 - DNA, 20 bp, Artificial Sequence
  Synthetic
tgcctggcacacagaggaca

SEQ ID NO: 35029 - DNA, 20 bp, Artificial Sequence
  Synthetic
gtccatgtcctctgtgtgcc

SEQ ID NO: 35030 - DNA, 20 bp, Artificial Sequence
  Synthetic
gcaggtagttgatgctgtaa

SEQ ID NO: 35031 - DNA, 20 bp, Artificial Sequence
  Synthetic
agcatcaactacctgcactt

SEQ ID NO: 35032 - DNA, 20 bp, Artificial Sequence
  Synthetic
gcatcaactacctgcacttt

SEQ ID NO: 35033 - DNA, 20 bp, Artificial Sequence
  Synthetic
catcaactacctgcactttg

SEQ ID NO: 35034 - DNA, 20 bp, Artificial Sequence
  Synthetic
ttttgggctccccaaagtgc

SEQ ID NO: 35035 - DNA, 20 bp, Artificial Sequence
  Synthetic
actttggggagcccaaaact

SEQ ID NO: 35036 - DNA, 20 bp, Artificial Sequence
  Synthetic
ggagcccaaaacttggtacg

SEQ ID NO: 35037 - DNA, 20 bp, Artificial Sequence
  Synthetic
ggcaccacgtaccaagtttt

SEQ ID NO: 35038 - DNA, 20 bp, Artificial Sequence
  Synthetic
gggcaccacgtaccaagttt

SEQ ID NO: 35039 - DNA, 20 bp, Artificial Sequence
  Synthetic
tacgtggtgcccccagaaca

SEQ ID NO: 35040 - DNA, 20 bp, Artificial Sequence
  Synthetic
aggtgctgaccatgttctgg

SEQ ID NO: 35041 - DNA, 20 bp, Artificial Sequence
  Synthetic
caggtgctgaccatgttctg

SEQ ID NO: 35042 - DNA, 20 bp, Artificial Sequence
  Synthetic
ccaggtgctgaccatgttct

SEQ ID NO: 35043 - DNA, 20 bp, Artificial Sequence
  Synthetic
cccagaacatggtcagcacc

SEQ ID NO: 35044 - DNA, 20 bp, Artificial Sequence
  Synthetic
tccaggtgctgaccatgttc

SEQ ID NO: 35045 - DNA, 20 bp, Artificial Sequence
  Synthetic
tggtcagcacctggaacgcc

SEQ ID NO: 35046 - DNA, 20 bp, Artificial Sequence
  Synthetic
agcacctggaacgcctggcc

SEQ ID NO: 35047 - DNA, 20 bp, Artificial Sequence
  Synthetic
gcacctggaacgcctggcca

SEQ ID NO: 35048 - DNA, 20 bp, Artificial Sequence
  Synthetic
gctccctggccaggcgttcc

SEQ ID NO: 35049 - DNA, 20 bp, Artificial Sequence
  Synthetic
ctgggaagagctccctggcc

SEQ ID NO: 35050 - DNA, 20 bp, Artificial Sequence
  Synthetic
aatgtctgggaagagctccc

SEQ ID NO: 35051 - DNA, 20 bp, Artificial Sequence
  Synthetic
agctcttcccagacatttct

SEQ ID NO: 35052 - DNA, 20 bp, Artificial Sequence
  Synthetic
gctcttcccagacatttctc

SEQ ID NO: 35053 - DNA, 20 bp, Artificial Sequence
  Synthetic
ctcttcccagacatttctcg

SEQ ID NO: 35054 - DNA, 20 bp, Artificial Sequence
  Synthetic
cacagccccgagaaatgtct

SEQ ID NO: 35055 - DNA, 20 bp, Artificial Sequence
  Synthetic
tcacagccccgagaaatgtc

SEQ ID NO: 35056 - DNA, 20 bp, Artificial Sequence
  Synthetic
agacatttctcggggctgtg

SEQ ID NO: 35057 - DNA, 20 bp, Artificial Sequence
  Synthetic
ggggctgtgaggccttcctg

SEQ ID NO: 35058 - DNA, 20 bp, Artificial Sequence
  Synthetic
ggccttcctgcggcacaaag

SEQ ID NO: 35059 - DNA, 20 bp, Artificial Sequence
  Synthetic
ggccactttgtgccgcagga

SEQ ID NO: 35060 - DNA, 20 bp, Artificial Sequence
  Synthetic
tgagggccactttgtgccgc

SEQ ID NO: 35061 - DNA, 20 bp, Artificial Sequence
  Synthetic
gagaactgtaggcgagatga

SEQ ID NO: 35062 - DNA, 20 bp, Artificial Sequence
  Synthetic
tgagaactgtaggcgagatg

SEQ ID NO: 35063 - DNA, 20 bp, Artificial Sequence
  Synthetic
catctcgcctacagttctca

SEQ ID NO: 35064 - DNA, 20 bp, Artificial Sequence
  Synthetic
ccattttccttgagaactgt

SEQ ID NO: 35065 - DNA, 20 bp, Artificial Sequence
  Synthetic
cctacagttctcaaggaaaa

SEQ ID NO: 35066 - DNA, 20 bp, Artificial Sequence
  Synthetic
ctacagttctcaaggaaaat

SEQ ID NO: 35067 - DNA, 20 bp, Artificial Sequence
  Synthetic
tcccttcaattgcatgactc

SEQ ID NO: 35068 - DNA, 20 bp, Artificial Sequence
  Synthetic
tcctgagtcatgcaattgaa

SEQ ID NO: 35069 - DNA, 20 bp, Artificial Sequence
  Synthetic
ctcctgagtcatgcaattga

SEQ ID NO: 35070 - DNA, 20 bp, Artificial Sequence
  Synthetic
cttcaattgcatgactcagg

SEQ ID NO: 35071 - DNA, 20 bp, Artificial Sequence
  Synthetic
aattgcatgactcaggaggc

SEQ ID NO: 35072 - DNA, 20 bp, Artificial Sequence
  Synthetic
attgcatgactcaggaggct

SEQ ID NO: 35073 - DNA, 20 bp, Artificial Sequence
  Synthetic
ttgcatgactcaggaggctg

SEQ ID NO: 35074 - DNA, 20 bp, Artificial Sequence
  Synthetic
tcaggaggctggggagttca

SEQ ID NO: 35075 - DNA, 20 bp, Artificial Sequence
  Synthetic
ttcatggtgacctttcccta

SEQ ID NO: 35076 - DNA, 20 bp, Artificial Sequence
  Synthetic
agcatggtagccatagggaa

SEQ ID NO: 35077 - DNA, 20 bp, Artificial Sequence
  Synthetic
tttccctatggctaccatgc

SEQ ID NO: 35078 - DNA, 20 bp, Artificial Sequence
  Synthetic
aagccagcatggtagccata

SEQ ID NO: 35079 - DNA, 20 bp, Artificial Sequence
  Synthetic
gaagccagcatggtagccat

SEQ ID NO: 35080 - DNA, 20 bp, Artificial Sequence
  Synthetic
taccatgctggcttcaatca

SEQ ID NO: 35081 - DNA, 20 bp, Artificial Sequence
  Synthetic
agccgtgattgaagccagca

SEQ ID NO: 35082 - DNA, 20 bp, Artificial Sequence
  Synthetic
tcgtggagtggcaaaattaa

SEQ ID NO: 35083 - DNA, 20 bp, Artificial Sequence
  Synthetic
ggttgggtaaaacgtcatga

SEQ ID NO: 35084 - DNA, 20 bp, Artificial Sequence
  Synthetic
catgacgttttacccaacca

SEQ ID NO: 35085 - DNA, 20 bp, Artificial Sequence
  Synthetic
ctgcaaattcttccatggtt

SEQ ID NO: 35086 - DNA, 20 bp, Artificial Sequence
  Synthetic
tctgcaaattcttccatggt

SEQ ID NO: 35087 - DNA, 20 bp, Artificial Sequence
  Synthetic
gaaatctgcaaattcttcca

SEQ ID NO: 35088 - DNA, 20 bp, Artificial Sequence
  Synthetic
caacacatatgttgcttaca

SEQ ID NO: 35089 - DNA, 20 bp, Artificial Sequence
  Synthetic
gttgcttacatggagtccca

SEQ ID NO: 35090 - DNA, 20 bp, Artificial Sequence
  Synthetic
tcccaaggcgcacatcaagc

SEQ ID NO: 35091 - DNA, 20 bp, Artificial Sequence
  Synthetic
gccagcttgatgtgcgcctt

SEQ ID NO: 35092 - DNA, 20 bp, Artificial Sequence
  Synthetic
ggccagcttgatgtgcgcct

SEQ ID NO: 35093 - DNA, 20 bp, Artificial Sequence
  Synthetic
acatcaagctggccttgcca

SEQ ID NO: 35094 - DNA, 20 bp, Artificial Sequence
  Synthetic
tgggtggaattaccttggca

SEQ ID NO: 35095 - DNA, 20 bp, Artificial Sequence
  Synthetic
ttccttgggtggaattacct

SEQ ID NO: 35096 - DNA, 20 bp, Artificial Sequence
  Synthetic
atttgccgcaagacagccag

SEQ ID NO: 35097 - DNA, 20 bp, Artificial Sequence
  Synthetic
tttgccgcaagacagccagt

SEQ ID NO: 35098 - DNA, 20 bp, Artificial Sequence
  Synthetic
taaacccactggctgtcttg

SEQ ID NO: 35099 - DNA, 20 bp, Artificial Sequence
  Synthetic
acactgtagcataaacccac

SEQ ID NO: 35100 - DNA, 20 bp, Artificial Sequence
  Synthetic
agtgtgagctctgcaaagac

SEQ ID NO: 35101 - DNA, 20 bp, Artificial Sequence
  Synthetic
gaagaggaacacagctgtta

SEQ ID NO: 35102 - DNA, 20 bp, Artificial Sequence
  Synthetic
tgggaacttgatttaggaag

SEQ ID NO: 35103 - DNA, 20 bp, Artificial Sequence
  Synthetic
tttttttgggaacttgattt

SEQ ID NO: 35104 - DNA, 20 bp, Artificial Sequence
  Synthetic
aaatcaagttcccaaaaaaa

SEQ ID NO: 35105 - DNA, 20 bp, Artificial Sequence
  Synthetic
ccagctggatcctttttttt

SEQ ID NO: 35106 - DNA, 20 bp, Artificial Sequence
  Synthetic
cccaaaaaaaaggatccagc

SEQ ID NO: 35107 - DNA, 20 bp, Artificial Sequence
  Synthetic
gccagctggatccttttttt

SEQ ID NO: 35108 - DNA, 20 bp, Artificial Sequence
  Synthetic
tacttctttagcttgccagc

SEQ ID NO: 35109 - DNA, 20 bp, Artificial Sequence
  Synthetic
tcctttgccctctttgtatg

SEQ ID NO: 35110 - DNA, 20 bp, Artificial Sequence
  Synthetic
accgcatacaaagagggcaa

SEQ ID NO: 35111 - DNA, 20 bp, Artificial Sequence
  Synthetic
ttcgagaccgcatacaaaga

SEQ ID NO: 35112 - DNA, 20 bp, Artificial Sequence
  Synthetic
cttcgagaccgcatacaaag

SEQ ID NO: 35113 - DNA, 20 bp, Artificial Sequence
  Synthetic
ctctatgtttgtatgttttg

SEQ ID NO: 35114 - DNA, 20 bp, Artificial Sequence
  Synthetic
atgtttgtatgttttgtggt

SEQ ID NO: 35115 - DNA, 20 bp, Artificial Sequence
  Synthetic
tgtttgtatgttttgtggtc

SEQ ID NO: 35116 - DNA, 20 bp, Artificial Sequence
  Synthetic
gtttgtatgttttgtggtcg

SEQ ID NO: 35117 - DNA, 20 bp, Artificial Sequence
  Synthetic
gataaattgcttttgtgtga

SEQ ID NO: 35118 - DNA, 20 bp, Artificial Sequence
  Synthetic
ttgggcacatcaggtagtgg

SEQ ID NO: 35119 - DNA, 20 bp, Artificial Sequence
  Synthetic
cctttgggcacatcaggtag

SEQ ID NO: 35120 - DNA, 20 bp, Artificial Sequence
  Synthetic
ccactacctgatgtgcccaa

SEQ ID NO: 35121 - DNA, 20 bp, Artificial Sequence
  Synthetic
cagtctcctttgggcacatc

SEQ ID NO: 35122 - DNA, 20 bp, Artificial Sequence
  Synthetic
ctgatgtgcccaaaggagac

SEQ ID NO: 35123 - DNA, 20 bp, Artificial Sequence
  Synthetic
atgtgcccaaaggagactgg

SEQ ID NO: 35124 - DNA, 20 bp, Artificial Sequence
  Synthetic
ggacacctccagtctccttt

SEQ ID NO: 35125 - DNA, 20 bp, Artificial Sequence
  Synthetic
aggacacctccagtctcctt

SEQ ID NO: 35126 - DNA, 20 bp, Artificial Sequence
  Synthetic
gtgtcctaaatgtgtcgccg

SEQ ID NO: 35127 - DNA, 20 bp, Artificial Sequence
  Synthetic
tgtacctcggcgacacattt

SEQ ID NO: 35128 - DNA, 20 bp, Artificial Sequence
  Synthetic
gaaagtgccgtggctctatg

SEQ ID NO: 35129 - DNA, 20 bp, Artificial Sequence
  Synthetic
aaagtgccgtggctctatgt

SEQ ID NO: 35130 - DNA, 20 bp, Artificial Sequence
  Synthetic
cacattcccacatagagcca

SEQ ID NO: 35131 - DNA, 20 bp, Artificial Sequence
  Synthetic
tgtgcttctcttctttttgc

SEQ ID NO: 35132 - DNA, 20 bp, Artificial Sequence
  Synthetic
ttctttttgctggcacattg

SEQ ID NO: 35133 - DNA, 20 bp, Artificial Sequence
  Synthetic
gctggcacattgaggatcac

SEQ ID NO: 35134 - DNA, 20 bp, Artificial Sequence
  Synthetic
attccatcaactacttgcac

SEQ ID NO: 35135 - DNA, 20 bp, Artificial Sequence
  Synthetic
ataccagtgcaagtagttga

SEQ ID NO: 35136 - DNA, 20 bp, Artificial Sequence
  Synthetic
ctaggggggagccaaagaca

SEQ ID NO: 35137 - DNA, 20 bp, Artificial Sequence
  Synthetic
ggggagccaaagacatggta

SEQ ID NO: 35138 - DNA, 20 bp, Artificial Sequence
  Synthetic
ggcacaccataccatgtctt

SEQ ID NO: 35139 - DNA, 20 bp, Artificial Sequence
  Synthetic
agttgctctgcagcatgaga

SEQ ID NO: 35140 - DNA, 20 bp, Artificial Sequence
  Synthetic
atctcatgctgcagagcaac

SEQ ID NO: 35141 - DNA, 20 bp, Artificial Sequence
  Synthetic
tcatgctgcagagcaactgg

SEQ ID NO: 35142 - DNA, 20 bp, Artificial Sequence
  Synthetic
tgctgcagagcaactggagg

SEQ ID NO: 35143 - DNA, 20 bp, Artificial Sequence
  Synthetic
ggaggaggtgatgagagagc

SEQ ID NO: 35144 - DNA, 20 bp, Artificial Sequence
  Synthetic
ctgggattcaaataactcgg

SEQ ID NO: 35145 - DNA, 20 bp, Artificial Sequence
  Synthetic
gctgggattcaaataactcg

SEQ ID NO: 35146 - DNA, 20 bp, Artificial Sequence
  Synthetic
ggctgggattcaaataactc

SEQ ID NO: 35147 - DNA, 20 bp, Artificial Sequence
  Synthetic
aggctgggattcaaataact

SEQ ID NO: 35148 - DNA, 20 bp, Artificial Sequence
  Synthetic
ctgatgcagaagatcaggct

SEQ ID NO: 35149 - DNA, 20 bp, Artificial Sequence
  Synthetic
actgatgcagaagatcaggc

SEQ ID NO: 35150 - DNA, 20 bp, Artificial Sequence
  Synthetic
actaactgatgcagaagatc

SEQ ID NO: 35151 - DNA, 20 bp, Artificial Sequence
  Synthetic
tagcacgttggggttcatga

SEQ ID NO: 35152 - DNA, 20 bp, Artificial Sequence
  Synthetic
catgaaccccaacgtgctaa

SEQ ID NO: 35153 - DNA, 20 bp, Artificial Sequence
  Synthetic
catgctccattagcacgttg

SEQ ID NO: 35154 - DNA, 20 bp, Artificial Sequence
  Synthetic
ccatgctccattagcacgtt

SEQ ID NO: 35155 - DNA, 20 bp, Artificial Sequence
  Synthetic
cccaacgtgctaatggagca

SEQ ID NO: 35156 - DNA, 20 bp, Artificial Sequence
  Synthetic
accatgctccattagcacgt

SEQ ID NO: 35157 - DNA, 20 bp, Artificial Sequence
  Synthetic
caatttgcatttaggtgtac

SEQ ID NO: 35158 - DNA, 20 bp, Artificial Sequence
  Synthetic
tacaggaccaatcagtgtgc

SEQ ID NO: 35159 - DNA, 20 bp, Artificial Sequence
  Synthetic
aaactcgccagcacactgat

SEQ ID NO: 35160 - DNA, 20 bp, Artificial Sequence
  Synthetic
tttcctcgtgcctatcactc

SEQ ID NO: 35161 - DNA, 20 bp, Artificial Sequence
  Synthetic
aatccagagtgataggcacg

SEQ ID NO: 35162 - DNA, 20 bp, Artificial Sequence
  Synthetic
ctggttaaatccagagtgat

SEQ ID NO: 35163 - DNA, 20 bp, Artificial Sequence
  Synthetic
ctatcactctggatttaacc

SEQ ID NO: 35164 - DNA, 20 bp, Artificial Sequence
  Synthetic
tatcactctggatttaacca

SEQ ID NO: 35165 - DNA, 20 bp, Artificial Sequence
  Synthetic
cttcagcaaagttgtagccc

SEQ ID NO: 35166 - DNA, 20 bp, Artificial Sequence
  Synthetic
ggcaatgaccagagtgagat

SEQ ID NO: 35167 - DNA, 20 bp, Artificial Sequence
  Synthetic
caagaaatccaatctcactc

SEQ ID NO: 35168 - DNA, 20 bp, Artificial Sequence
  Synthetic
cagagtgagattggatttct

SEQ ID NO: 35169 - DNA, 20 bp, Artificial Sequence
  Synthetic
tggatcaactagcaaaattt

SEQ ID NO: 35170 - DNA, 20 bp, Artificial Sequence
  Synthetic
ggatcaactagcaaaatttt

SEQ ID NO: 35171 - DNA, 20 bp, Artificial Sequence
  Synthetic
gcaaaattttgggaacttca

SEQ ID NO: 35172 - DNA, 20 bp, Artificial Sequence
  Synthetic
atctactctgaagatccctg

SEQ ID NO: 35173 - DNA, 20 bp, Artificial Sequence
  Synthetic
ggatttttctctctaccaca

SEQ ID NO: 35174 - DNA, 20 bp, Artificial Sequence
  Synthetic
aggatttttctctctaccac

SEQ ID NO: 35175 - DNA, 20 bp, Artificial Sequence
  Synthetic
tgtggtagagagaaaaatcc

SEQ ID NO: 35176 - DNA, 20 bp, Artificial Sequence
  Synthetic
tgctcaaagcatacagatcc

SEQ ID NO: 35177 - DNA, 20 bp, Artificial Sequence
  Synthetic
ggatctgtatgctttgagca

SEQ ID NO: 35178 - DNA, 20 bp, Artificial Sequence
  Synthetic
tttcagattgttgccagcaa

SEQ ID NO: 35179 - DNA, 20 bp, Artificial Sequence
  Synthetic
cagattgttgccagcaaagg

SEQ ID NO: 35180 - DNA, 20 bp, Artificial Sequence
  Synthetic
catttcaaaacctcctttgc

SEQ ID NO: 35181 - DNA, 20 bp, Artificial Sequence
  Synthetic
cagcaaaggaggttttgaaa

SEQ ID NO: 35182 - DNA, 20 bp, Artificial Sequence
  Synthetic
tggtcaccaaagagaagaaa

SEQ ID NO: 35183 - DNA, 20 bp, Artificial Sequence
  Synthetic
tttagaccatttcttctctt

SEQ ID NO: 35184 - DNA, 20 bp, Artificial Sequence
  Synthetic
agagaagaaatggtctaaag

SEQ ID NO: 35185 - DNA, 20 bp, Artificial Sequence
  Synthetic
gagaagaaatggtctaaagt

SEQ ID NO: 35186 - DNA, 20 bp, Artificial Sequence
  Synthetic
gtctaaagtgggtagtcgct

SEQ ID NO: 35187 - DNA, 20 bp, Artificial Sequence
  Synthetic
tctaaagtgggtagtcgctt

SEQ ID NO: 35188 - DNA, 20 bp, Artificial Sequence
  Synthetic
agtcgcttgggatatctgcc

SEQ ID NO: 35189 - DNA, 20 bp, Artificial Sequence
  Synthetic
ttgggatatctgccaggaaa

SEQ ID NO: 35190 - DNA, 20 bp, Artificial Sequence
  Synthetic
tatctgccaggaaaaggaac

SEQ ID NO: 35191 - DNA, 20 bp, Artificial Sequence
  Synthetic
atctgccaggaaaaggaact

SEQ ID NO: 35192 - DNA, 20 bp, Artificial Sequence
  Synthetic
agagacccagttccttttcc

SEQ ID NO: 35193 - DNA, 20 bp, Artificial Sequence
  Synthetic
cagactggaaaagctcatat

SEQ ID NO: 35194 - DNA, 20 bp, Artificial Sequence
  Synthetic
ccagactggaaaagctcata

SEQ ID NO: 35195 - DNA, 20 bp, Artificial Sequence
  Synthetic
gccccgtctttgagccgagt

SEQ ID NO: 35196 - DNA, 20 bp, Artificial Sequence
  Synthetic
cccaactcggctcaaagacg

SEQ ID NO: 35197 - DNA, 20 bp, Artificial Sequence
  Synthetic
ccccgtctttgagccgagtt

SEQ ID NO: 35198 - DNA, 20 bp, Artificial Sequence
  Synthetic
tcccaactcggctcaaagac

SEQ ID NO: 35199 - DNA, 20 bp, Artificial Sequence
  Synthetic
ctcccaactcggctcaaaga

SEQ ID NO: 35200 - DNA, 20 bp, Artificial Sequence
  Synthetic
cgtctttgagccgagttggg

SEQ ID NO: 35201 - DNA, 20 bp, Artificial Sequence
  Synthetic
tctgtgaactcctcccaact

SEQ ID NO: 35202 - DNA, 20 bp, Artificial Sequence
  Synthetic
acagatccgctcagctttat

SEQ ID NO: 35203 - DNA, 20 bp, Artificial Sequence
  Synthetic
atgcggccgataaagctgag

SEQ ID NO: 35204 - DNA, 20 bp, Artificial Sequence
  Synthetic
tcagctttatcggccgcatc

SEQ ID NO: 35205 - DNA, 20 bp, Artificial Sequence
  Synthetic
tatcggccgcatccggcctt

SEQ ID NO: 35206 - DNA, 20 bp, Artificial Sequence
  Synthetic
cggccgcatccggcctttgg

SEQ ID NO: 35207 - DNA, 20 bp, Artificial Sequence
  Synthetic
tctccgccaaaggccggatg

SEQ ID NO: 35208 - DNA, 20 bp, Artificial Sequence
  Synthetic
cggttttctccgccaaaggc

SEQ ID NO: 35209 - DNA, 20 bp, Artificial Sequence
  Synthetic
cggcctttggcggagaaaac

SEQ ID NO: 35210 - DNA, 20 bp, Artificial Sequence
  Synthetic
atgccggttttctccgccaa

SEQ ID NO: 35211 - DNA, 20 bp, Artificial Sequence
  Synthetic
aaaccggcatctgcaaaatt

SEQ ID NO: 35212 - DNA, 20 bp, Artificial Sequence
  Synthetic
cggccgaattttgcagatgc

SEQ ID NO: 35213 - DNA, 20 bp, Artificial Sequence
  Synthetic
gtgagctgcctgcagccaga

SEQ ID NO: 35214 - DNA, 20 bp, Artificial Sequence
  Synthetic
cctcatctccttctggctgc

SEQ ID NO: 35215 - DNA, 20 bp, Artificial Sequence
  Synthetic
cctgcagccagaaggagatg

SEQ ID NO: 35216 - DNA, 20 bp, Artificial Sequence
  Synthetic
tcactgacctcatctccttc

SEQ ID NO: 35217 - DNA, 20 bp, Artificial Sequence
  Synthetic
ctctttgtaaccaggtggac

SEQ ID NO: 35218 - DNA, 20 bp, Artificial Sequence
  Synthetic
tctttgtaaccaggtggact

SEQ ID NO: 35219 - DNA, 20 bp, Artificial Sequence
  Synthetic
cacactggacccagtccacc

SEQ ID NO: 35220 - DNA, 20 bp, Artificial Sequence
  Synthetic
gtggactgggtccagtgtga

SEQ ID NO: 35221 - DNA, 20 bp, Artificial Sequence
  Synthetic
gattgcagctgccatcacac

SEQ ID NO: 35222 - DNA, 20 bp, Artificial Sequence
  Synthetic
gtgatggcagctgcaatcag

SEQ ID NO: 35223 - DNA, 20 bp, Artificial Sequence
  Synthetic
ctgcaatcagtggtttcatc

SEQ ID NO: 35224 - DNA, 20 bp, Artificial Sequence
  Synthetic
tggtttcatcaggtctgtgt

SEQ ID NO: 35225 - DNA, 20 bp, Artificial Sequence
  Synthetic
tgttggtgtctccccagaga

SEQ ID NO: 35226 - DNA, 20 bp, Artificial Sequence
  Synthetic
ttctttctctgccatctctg

SEQ ID NO: 35227 - DNA, 20 bp, Artificial Sequence
  Synthetic
cttctttctctgccatctct

SEQ ID NO: 35228 - DNA, 20 bp, Artificial Sequence
  Synthetic
tcttctttctctgccatctc

SEQ ID NO: 35229 - DNA, 20 bp, Artificial Sequence
  Synthetic
ctgtgtgcgctgtactgtga

SEQ ID NO: 35230 - DNA, 20 bp, Artificial Sequence
  Synthetic
aaaaatctgcctatgtcaga

SEQ ID NO: 35231 - DNA, 20 bp, Artificial Sequence
  Synthetic
cagctggggccttctgacat

SEQ ID NO: 35232 - DNA, 20 bp, Artificial Sequence
  Synthetic
ttgaatcataggggcagctg

SEQ ID NO: 35233 - DNA, 20 bp, Artificial Sequence
  Synthetic
attgaatcataggggcagct

SEQ ID NO: 35234 - DNA, 20 bp, Artificial Sequence
  Synthetic
cattgaatcataggggcagc

SEQ ID NO: 35235 - DNA, 20 bp, Artificial Sequence
  Synthetic
gagttcacattgaatcatag

SEQ ID NO: 35236 - DNA, 20 bp, Artificial Sequence
  Synthetic
agagttcacattgaatcata

SEQ ID NO: 35237 - DNA, 20 bp, Artificial Sequence
  Synthetic
cagagttcacattgaatcat

SEQ ID NO: 35238 - DNA, 20 bp, Artificial Sequence
  Synthetic
tgattcaatgtgaactctgc

SEQ ID NO: 35239 - DNA, 20 bp, Artificial Sequence
  Synthetic
gattcaatgtgaactctgca

SEQ ID NO: 35240 - DNA, 20 bp, Artificial Sequence
  Synthetic
tgctttccacaccagttgtg

SEQ ID NO: 35241 - DNA, 20 bp, Artificial Sequence
  Synthetic
tttccacaccagttgtgtgg

SEQ ID NO: 35242 - DNA, 20 bp, Artificial Sequence
  Synthetic
gtaccgccacacaactggtg

SEQ ID NO: 35243 - DNA, 20 bp, Artificial Sequence
  Synthetic
actgggtaccgccacacaac

SEQ ID NO: 35244 - DNA, 20 bp, Artificial Sequence
  Synthetic
ggcggtacccagtatttcac

SEQ ID NO: 35245 - DNA, 20 bp, Artificial Sequence
  Synthetic
gcggtacccagtatttcaca

SEQ ID NO: 35246 - DNA, 20 bp, Artificial Sequence
  Synthetic
cgcaggccctgtgaaatact

SEQ ID NO: 35247 - DNA, 20 bp, Artificial Sequence
  Synthetic
tcgcaggccctgtgaaatac

SEQ ID NO: 35248 - DNA, 20 bp, Artificial Sequence
  Synthetic
tttcacagggcctgcgaatc

SEQ ID NO: 35249 - DNA, 20 bp, Artificial Sequence
  Synthetic
ggggacaaagccagattcgc

SEQ ID NO: 35250 - DNA, 20 bp, Artificial Sequence
  Synthetic
tctggctttgtccccattgt

SEQ ID NO: 35251 - DNA, 20 bp, Artificial Sequence
  Synthetic
ggctttgtccccattgtcgg

SEQ ID NO: 35252 - DNA, 20 bp, Artificial Sequence
  Synthetic
ttctctgacctccgacaatg

SEQ ID NO: 35253 - DNA, 20 bp, Artificial Sequence
  Synthetic
tttctctgacctccgacaat

SEQ ID NO: 35254 - DNA, 20 bp, Artificial Sequence
  Synthetic
gtttctctgacctccgacaa

SEQ ID NO: 35255 - DNA, 20 bp, Artificial Sequence
  Synthetic
ctgtatgtctgtcttttatg

SEQ ID NO: 35256 - DNA, 20 bp, Artificial Sequence
  Synthetic
gtctgtcttttatgtggcag

SEQ ID NO: 35257 - DNA, 20 bp, Artificial Sequence
  Synthetic
gcagtggcaatgatgaagac

SEQ ID NO: 35258 - DNA, 20 bp, Artificial Sequence
  Synthetic
gaccggctactgttgtgtga

SEQ ID NO: 35259 - DNA, 20 bp, Artificial Sequence
  Synthetic
agccatcacacaacagtagc

SEQ ID NO: 35260 - DNA, 20 bp, Artificial Sequence
  Synthetic
gtgggatcaagcaaaaggta

SEQ ID NO: 35261 - DNA, 20 bp, Artificial Sequence
  Synthetic
gagaggtgggatcaagcaaa

SEQ ID NO: 35262 - DNA, 20 bp, Artificial Sequence
  Synthetic
tgggaacatcatggagaggt

SEQ ID NO: 35263 - DNA, 20 bp, Artificial Sequence
  Synthetic
ttgggaacatcatggagagg

SEQ ID NO: 35264 - DNA, 20 bp, Artificial Sequence
  Synthetic
acctctccatgatgttccca

SEQ ID NO: 35265 - DNA, 20 bp, Artificial Sequence
  Synthetic
cccttgggaacatcatggag

SEQ ID NO: 35266 - DNA, 20 bp, Artificial Sequence
  Synthetic
cctctccatgatgttcccaa

SEQ ID NO: 35267 - DNA, 20 bp, Artificial Sequence
  Synthetic
agtctcccttgggaacatca

SEQ ID NO: 35268 - DNA, 20 bp, Artificial Sequence
  Synthetic
atgatgttcccaagggagac

SEQ ID NO: 35269 - DNA, 20 bp, Artificial Sequence
  Synthetic
atgttcccaagggagactgg

SEQ ID NO: 35270 - DNA, 20 bp, Artificial Sequence
  Synthetic
ggacacctccagtctccctt

SEQ ID NO: 35271 - DNA, 20 bp, Artificial Sequence
  Synthetic
aggacacctccagtctccct

SEQ ID NO: 35272 - DNA, 20 bp, Artificial Sequence
  Synthetic
ctggaggtgtcctaagtgtt

SEQ ID NO: 35273 - DNA, 20 bp, Artificial Sequence
  Synthetic
attacctgagccaaacactt

SEQ ID NO: 35274 - DNA, 20 bp, Artificial Sequence
  Synthetic
gaaacttccttggttgtatg

SEQ ID NO: 35275 - DNA, 20 bp, Artificial Sequence
  Synthetic
aaacttccttggttgtatgt

SEQ ID NO: 35276 - DNA, 20 bp, Artificial Sequence
  Synthetic
cacattcccacatacaacca

SEQ ID NO: 35277 - DNA, 20 bp, Artificial Sequence
  Synthetic
tgtgcttttcttcattctgt

SEQ ID NO: 35278 - DNA, 20 bp, Artificial Sequence
  Synthetic
gttggcacattgaagaccac

SEQ ID NO: 35279 - DNA, 20 bp, Artificial Sequence
  Synthetic
agttaattgaatagctccag

SEQ ID NO: 35280 - DNA, 20 bp, Artificial Sequence
  Synthetic
attcaattaactacttgcac

SEQ ID NO: 35281 - DNA, 20 bp, Artificial Sequence
  Synthetic
ccaggtttttggctcacccc

SEQ ID NO: 35282 - DNA, 20 bp, Artificial Sequence
  Synthetic
ccaggggtgagccaaaaacc

SEQ ID NO: 35283 - DNA, 20 bp, Artificial Sequence
  Synthetic
ggtgagccaaaaacctggta

SEQ ID NO: 35284 - DNA, 20 bp, Artificial Sequence
  Synthetic
gggactccataccaggtttt

SEQ ID NO: 35285 - DNA, 20 bp, Artificial Sequence
  Synthetic
aaaacctggtatggagtccc

SEQ ID NO: 35286 - DNA, 20 bp, Artificial Sequence
  Synthetic
aaacctggtatggagtccca

SEQ ID NO: 35287 - DNA, 20 bp, Artificial Sequence
  Synthetic
ataccctgggactccatacc

SEQ ID NO: 35288 - DNA, 20 bp, Artificial Sequence
  Synthetic
gctgctcagcagcataccct

SEQ ID NO: 35289 - DNA, 20 bp, Artificial Sequence
  Synthetic
agctgctcagcagcataccc

SEQ ID NO: 35290 - DNA, 20 bp, Artificial Sequence
  Synthetic
ggctgggacacaaagagttc

SEQ ID NO: 35291 - DNA, 20 bp, Artificial Sequence
  Synthetic
agaactctttgtgtcccagc

SEQ ID NO: 35292 - DNA, 20 bp, Artificial Sequence
  Synthetic
ctgatggaggagatccggct

SEQ ID NO: 35293 - DNA, 20 bp, Artificial Sequence
  Synthetic
gctgatggaggagatccggc

SEQ ID NO: 35294 - DNA, 20 bp, Artificial Sequence
  Synthetic
acaagctgatggaggagatc

SEQ ID NO: 35295 - DNA, 20 bp, Artificial Sequence
  Synthetic
tgatggtcacaagctgatgg

SEQ ID NO: 35296 - DNA, 20 bp, Artificial Sequence
  Synthetic
tcatgatggtcacaagctga

SEQ ID NO: 35297 - DNA, 20 bp, Artificial Sequence
  Synthetic
cagggtattggggttcatga

SEQ ID NO: 35298 - DNA, 20 bp, Artificial Sequence
  Synthetic
catgagtcatcagggtattg

SEQ ID NO: 35299 - DNA, 20 bp, Artificial Sequence
  Synthetic
tcatgagtcatcagggtatt

SEQ ID NO: 35300 - DNA, 20 bp, Artificial Sequence
  Synthetic
ttcatgagtcatcagggtat

SEQ ID NO: 35301 - DNA, 20 bp, Artificial Sequence
  Synthetic
aggcacttcatgagtcatca

SEQ ID NO: 35302 - DNA, 20 bp, Artificial Sequence
  Synthetic
caggcacttcatgagtcatc

SEQ ID NO: 35303 - DNA, 20 bp, Artificial Sequence
  Synthetic
taccgaactaatcagtgtgc

SEQ ID NO: 35304 - DNA, 20 bp, Artificial Sequence
  Synthetic
accgaactaatcagtgtgct

SEQ ID NO: 35305 - DNA, 20 bp, Artificial Sequence
  Synthetic
ccccagcacactgattagtt

SEQ ID NO: 35306 - DNA, 20 bp, Artificial Sequence
  Synthetic
ccgaactaatcagtgtgctg

SEQ ID NO: 35307 - DNA, 20 bp, Artificial Sequence
  Synthetic
tttccaagagcctaccacag

SEQ ID NO: 35308 - DNA, 20 bp, Artificial Sequence
  Synthetic
aaaccactgtggtaggctct

SEQ ID NO: 35309 - DNA, 20 bp, Artificial Sequence
  Synthetic
ctggttaaaaccactgtggt

SEQ ID NO: 35310 - DNA, 20 bp, Artificial Sequence
  Synthetic
ctaccacagtggttttaacc

SEQ ID NO: 35311 - DNA, 20 bp, Artificial Sequence
  Synthetic
taccacagtggttttaacca

SEQ ID NO: 35312 - DNA, 20 bp, Artificial Sequence
  Synthetic
aaccctggttaaaaccactg

SEQ ID NO: 35313 - DNA, 20 bp, Artificial Sequence
  Synthetic
cctcagcaaaattaaaaccc

SEQ ID NO: 35314 - DNA, 20 bp, Artificial Sequence
  Synthetic
ccagggttttaattttgctg

SEQ ID NO: 35315 - DNA, 20 bp, Artificial Sequence
  Synthetic
attcaattttacacgagttt

SEQ ID NO: 35316 - DNA, 20 bp, Artificial Sequence
  Synthetic
aattcaattttacacgagtt

SEQ ID NO: 35317 - DNA, 20 bp, Artificial Sequence
  Synthetic
tcgtgtaaaattgaatttct

SEQ ID NO: 35318 - DNA, 20 bp, Artificial Sequence
  Synthetic
tggaccagattgcaaagtac

SEQ ID NO: 35319 - DNA, 20 bp, Artificial Sequence
  Synthetic
ggaccagattgcaaagtact

SEQ ID NO: 35320 - DNA, 20 bp, Artificial Sequence
  Synthetic
actcccagtactttgcaatc

SEQ ID NO: 35321 - DNA, 20 bp, Artificial Sequence
  Synthetic
tgcaaagtactgggagttac

SEQ ID NO: 35322 - DNA, 20 bp, Artificial Sequence
  Synthetic
gcaaagtactgggagttaca

SEQ ID NO: 35323 - DNA, 20 bp, Artificial Sequence
  Synthetic
tactctgaaaattccacatg

SEQ ID NO: 35324 - DNA, 20 bp, Artificial Sequence
  Synthetic
tgaaaattccacatgtggag

SEQ ID NO: 35325 - DNA, 20 bp, Artificial Sequence
  Synthetic
aagatcttcctctccacatg

SEQ ID NO: 35326 - DNA, 20 bp, Artificial Sequence
  Synthetic
acatgtggagaggaagatct

SEQ ID NO: 35327 - DNA, 20 bp, Artificial Sequence
  Synthetic
ggacttatttcagcttaata

SEQ ID NO: 35328 - DNA, 20 bp, Artificial Sequence
  Synthetic
taacagttagttgcagaaga

SEQ ID NO: 35329 - DNA, 20 bp, Artificial Sequence
  Synthetic
cagttagttgcagaagaagg

SEQ ID NO: 35330 - DNA, 20 bp, Artificial Sequence
  Synthetic
tggatttgcagttgtttgca

SEQ ID NO: 35331 - DNA, 20 bp, Artificial Sequence
  Synthetic
ttgtttgcaaggatagaaaa

SEQ ID NO: 35332 - DNA, 20 bp, Artificial Sequence
  Synthetic
gaccaaaattgctaccaaga

SEQ ID NO: 35333 - DNA, 20 bp, Artificial Sequence
  Synthetic
accaaaattgctaccaagat

SEQ ID NO: 35334 - DNA, 20 bp, Artificial Sequence
  Synthetic
ccccatcttggtagcaattt

SEQ ID NO: 35335 - DNA, 20 bp, Artificial Sequence
  Synthetic
ccaaaattgctaccaagatg

SEQ ID NO: 35336 - DNA, 20 bp, Artificial Sequence
  Synthetic
accaagatggggtttgctcc

SEQ ID NO: 35337 - DNA, 20 bp, Artificial Sequence
  Synthetic
gccaggagcaaaccccatct

SEQ ID NO: 35338 - DNA, 20 bp, Artificial Sequence
  Synthetic
gtttgctcctggcaaagcag

SEQ ID NO: 35339 - DNA, 20 bp, Artificial Sequence
  Synthetic
tttgctcctggcaaagcagt

SEQ ID NO: 35340 - DNA, 20 bp, Artificial Sequence
  Synthetic
tgtgagcccactgctttgcc

SEQ ID NO: 35341 - DNA, 20 bp, Artificial Sequence
  Synthetic
gcagtgggctcacatatcag

SEQ ID NO: 35342 - DNA, 20 bp, Artificial Sequence
  Synthetic
cagtgggctcacatatcaga

SEQ ID NO: 35343 - DNA, 20 bp, Artificial Sequence
  Synthetic
cggacaggaataagttgtag

SEQ ID NO: 35344 - DNA, 20 bp, Artificial Sequence
  Synthetic
ccggacaggaataagttgta

SEQ ID NO: 35345 - DNA, 20 bp, Artificial Sequence
  Synthetic
tccggacaggaataagttgt

SEQ ID NO: 35346 - DNA, 20 bp, Artificial Sequence
  Synthetic
gcccggtcttcgaacccagc

SEQ ID NO: 35347 - DNA, 20 bp, Artificial Sequence
  Synthetic
cccagctgggttcgaagacc

SEQ ID NO: 35348 - DNA, 20 bp, Artificial Sequence
  Synthetic
cccggtcttcgaacccagct

SEQ ID NO: 35349 - DNA, 20 bp, Artificial Sequence
  Synthetic
tcccagctgggttcgaagac

SEQ ID NO: 35350 - DNA, 20 bp, Artificial Sequence
  Synthetic
acccagctgggaagagttcg

SEQ ID NO: 35351 - DNA, 20 bp, Artificial Sequence
  Synthetic
tccgcgaactcttcccagct

SEQ ID NO: 35352 - DNA, 20 bp, Artificial Sequence
  Synthetic
gtccgcgaactcttcccagc

SEQ ID NO: 35353 - DNA, 20 bp, Artificial Sequence
  Synthetic
tcttgtggatgaaagcgaag

SEQ ID NO: 35354 - DNA, 20 bp, Artificial Sequence
  Synthetic
atcttgtggatgaaagcgaa

SEQ ID NO: 35355 - DNA, 20 bp, Artificial Sequence
  Synthetic
gatcttgtggatgaaagcga

SEQ ID NO: 35356 - DNA, 20 bp, Artificial Sequence
  Synthetic
tcgctttcatccacaagatc

SEQ ID NO: 35357 - DNA, 20 bp, Artificial Sequence
  Synthetic
cggctatgggccggatcttg

SEQ ID NO: 35358 - DNA, 20 bp, Artificial Sequence
  Synthetic
cagtctgctcggctatgggc

SEQ ID NO: 35359 - DNA, 20 bp, Artificial Sequence
  Synthetic
cggcccatagccgagcagac

SEQ ID NO: 35360 - DNA, 20 bp, Artificial Sequence
  Synthetic
atgccagtctgctcggctat

SEQ ID NO: 35361 - DNA, 20 bp, Artificial Sequence
  Synthetic
gatgccagtctgctcggcta

SEQ ID NO: 35362 - DNA, 20 bp, Artificial Sequence
  Synthetic
cttacagatgccagtctgct

SEQ ID NO: 35363 - DNA, 20 bp, Artificial Sequence
  Synthetic
cgagcagactggcatctgta

SEQ ID NO: 35364 - DNA, 20 bp, Artificial Sequence
  Synthetic
agactggcatctgtaaggtg

SEQ ID NO: 35365 - DNA, 20 bp, Artificial Sequence
  Synthetic
agattgagtcatatgtctgc

SEQ ID NO: 35366 - DNA, 20 bp, Artificial Sequence
  Synthetic
gtctgccggatgtgttctcg

SEQ ID NO: 35367 - DNA, 20 bp, Artificial Sequence
  Synthetic
tctgccggatgtgttctcga

SEQ ID NO: 35368 - DNA, 20 bp, Artificial Sequence
  Synthetic
ctgccggatgtgttctcgag

SEQ ID NO: 35369 - DNA, 20 bp, Artificial Sequence
  Synthetic
catcccctcgagaacacatc

SEQ ID NO: 35370 - DNA, 20 bp, Artificial Sequence
  Synthetic
gatgtgttctcgaggggatg

SEQ ID NO: 35371 - DNA, 20 bp, Artificial Sequence
  Synthetic
gacaagctcctgctgtgtga

SEQ ID NO: 35372 - DNA, 20 bp, Artificial Sequence
  Synthetic
catcacagccatcacacagc

SEQ ID NO: 35373 - DNA, 20 bp, Artificial Sequence
  Synthetic
gaggcagcaggcagaagatg

SEQ ID NO: 35374 - DNA, 20 bp, Artificial Sequence
  Synthetic
tctcaggcagaggaggcagc

SEQ ID NO: 35375 - DNA, 20 bp, Artificial Sequence
  Synthetic
ttggggatctcaggcagagg

SEQ ID NO: 35376 - DNA, 20 bp, Artificial Sequence
  Synthetic
tcctctgcctgagatcccca

SEQ ID NO: 35377 - DNA, 20 bp, Artificial Sequence
  Synthetic
cccttggggatctcaggcag

SEQ ID NO: 35378 - DNA, 20 bp, Artificial Sequence
  Synthetic
cctctgcctgagatccccaa

SEQ ID NO: 35379 - DNA, 20 bp, Artificial Sequence
  Synthetic
cagacacccttggggatctc

SEQ ID NO: 35380 - DNA, 20 bp, Artificial Sequence
  Synthetic
ctgagatccccaagggtgtc

SEQ ID NO: 35381 - DNA, 20 bp, Artificial Sequence
  Synthetic
agatccccaagggtgtctgg

SEQ ID NO: 35382 - DNA, 20 bp, Artificial Sequence
  Synthetic
ggcaccgccagacacccttg

SEQ ID NO: 35383 - DNA, 20 bp, Artificial Sequence
  Synthetic
gggcaccgccagacaccctt

SEQ ID NO: 35384 - DNA, 20 bp, Artificial Sequence
  Synthetic
tgggcaccgccagacaccct

SEQ ID NO: 35385 - DNA, 20 bp, Artificial Sequence
  Synthetic
gcggtgcccaaagtgtgtca

SEQ ID NO: 35386 - DNA, 20 bp, Artificial Sequence
  Synthetic
ttaccgccatgacacacttt

SEQ ID NO: 35387 - DNA, 20 bp, Artificial Sequence
  Synthetic
cttaccgccatgacacactt

SEQ ID NO: 35388 - DNA, 20 bp, Artificial Sequence
  Synthetic
acaacctctatctgtgtgtg

SEQ ID NO: 35389 - DNA, 20 bp, Artificial Sequence
  Synthetic
caacctctatctgtgtgtgt

SEQ ID NO: 35390 - DNA, 20 bp, Artificial Sequence
  Synthetic
ctgcccacacacacagatag

SEQ ID NO: 35391 - DNA, 20 bp, Artificial Sequence
  Synthetic
ctctatctgtgtgtgtgggc

SEQ ID NO: 35392 - DNA, 20 bp, Artificial Sequence
  Synthetic
ctgtgtgtgtgggcaggtgc

SEQ ID NO: 35393 - DNA, 20 bp, Artificial Sequence
  Synthetic
gtgtgtgggcaggtgctggc

SEQ ID NO: 35394 - DNA, 20 bp, Artificial Sequence
  Synthetic
tgtgtgggcaggtgctggct

SEQ ID NO: 35395 - DNA, 20 bp, Artificial Sequence
  Synthetic
gtgtgggcaggtgctggctg

SEQ ID NO: 35396 - DNA, 20 bp, Artificial Sequence
  Synthetic
tgggcaggtgctggctgggg

SEQ ID NO: 35397 - DNA, 20 bp, Artificial Sequence
  Synthetic
gggcaggtgctggctggggc

SEQ ID NO: 35398 - DNA, 20 bp, Artificial Sequence
  Synthetic
tctgcagtgtgacctgtgtc

SEQ ID NO: 35399 - DNA, 20 bp, Artificial Sequence
  Synthetic
agtgtgacctgtgtcaggac

SEQ ID NO: 35400 - DNA, 20 bp, Artificial Sequence
  Synthetic
catggaaccagtcctgacac

SEQ ID NO: 35401 - DNA, 20 bp, Artificial Sequence
  Synthetic
ctgtgtcaggactggttcca

SEQ ID NO: 35402 - DNA, 20 bp, Artificial Sequence
  Synthetic
tgtgtcaggactggttccat

SEQ ID NO: 35403 - DNA, 20 bp, Artificial Sequence
  Synthetic
gtcaggactggttccatggg

SEQ ID NO: 35404 - DNA, 20 bp, Artificial Sequence
  Synthetic
gcactgacacacaccgccca

SEQ ID NO: 35405 - DNA, 20 bp, Artificial Sequence
  Synthetic
ctcggagagctgaggaggcg

SEQ ID NO: 35406 - DNA, 20 bp, Artificial Sequence
  Synthetic
ctcgcctcctcagctctccg

SEQ ID NO: 35407 - DNA, 20 bp, Artificial Sequence
  Synthetic
tgggcctcggagagctgagg

SEQ ID NO: 35408 - DNA, 20 bp, Artificial Sequence
  Synthetic
gattgggcctcggagagctg

SEQ ID NO: 35409 - DNA, 20 bp, Artificial Sequence
  Synthetic
gatgaggtgggattgggcct

SEQ ID NO: 35410 - DNA, 20 bp, Artificial Sequence
  Synthetic
agtggggatgaggtgggatt

SEQ ID NO: 35411 - DNA, 20 bp, Artificial Sequence
  Synthetic
cagtggggatgaggtgggat

SEQ ID NO: 35412 - DNA, 20 bp, Artificial Sequence
  Synthetic
tcccacctcatccccactgc

SEQ ID NO: 35413 - DNA, 20 bp, Artificial Sequence
  Synthetic
gccagcagtggggatgaggt

SEQ ID NO: 35414 - DNA, 20 bp, Artificial Sequence
  Synthetic
ggccagcagtggggatgagg

SEQ ID NO: 35415 - DNA, 20 bp, Artificial Sequence
  Synthetic
ccaggccagcagtggggatg

SEQ ID NO: 35416 - DNA, 20 bp, Artificial Sequence
  Synthetic
cctcatccccactgctggcc

SEQ ID NO: 35417 - DNA, 20 bp, Artificial Sequence
  Synthetic
catccccactgctggcctgg

SEQ ID NO: 35418 - DNA, 20 bp, Artificial Sequence
  Synthetic
atccccactgctggcctggt

SEQ ID NO: 35419 - DNA, 20 bp, Artificial Sequence
  Synthetic
ttcccaccaggccagcagtg

SEQ ID NO: 35420 - DNA, 20 bp, Artificial Sequence
  Synthetic
attcccaccaggccagcagt

SEQ ID NO: 35421 - DNA, 20 bp, Artificial Sequence
  Synthetic
cattcccaccaggccagcag

SEQ ID NO: 35422 - DNA, 20 bp, Artificial Sequence
  Synthetic
cactgctggcctggtgggaa

SEQ ID NO: 35423 - DNA, 20 bp, Artificial Sequence
  Synthetic
actgctggcctggtgggaat

SEQ ID NO: 35424 - DNA, 20 bp, Artificial Sequence
  Synthetic
tttggtgtcccattcccacc

SEQ ID NO: 35425 - DNA, 20 bp, Artificial Sequence
  Synthetic
acacagtggacacaggaatt

SEQ ID NO: 35426 - DNA, 20 bp, Artificial Sequence
  Synthetic
agcgcatacacagtggacac

SEQ ID NO: 35427 - DNA, 20 bp, Artificial Sequence
  Synthetic
cgccttgagcgcatacacag

SEQ ID NO: 35428 - DNA, 20 bp, Artificial Sequence
  Synthetic
gaaggtgccctggctctacg

SEQ ID NO: 35429 - DNA, 20 bp, Artificial Sequence
  Synthetic
aaggtgccctggctctacgt

SEQ ID NO: 35430 - DNA, 20 bp, Artificial Sequence
  Synthetic
gccctggctctacgtgggca

SEQ ID NO: 35431 - DNA, 20 bp, Artificial Sequence
  Synthetic
accatgcccacgtagagcca

SEQ ID NO: 35432 - DNA, 20 bp, Artificial Sequence
  Synthetic
gaccatgcccacgtagagcc

SEQ ID NO: 35433 - DNA, 20 bp, Artificial Sequence
  Synthetic
tggtcttctcagccttttgc

SEQ ID NO: 35434 - DNA, 20 bp, Artificial Sequence
  Synthetic
agccttttgctggcatattg

SEQ ID NO: 35435 - DNA, 20 bp, Artificial Sequence
  Synthetic
atcctcaatatgccagcaaa

SEQ ID NO: 35436 - DNA, 20 bp, Artificial Sequence
  Synthetic
gctggcatattgaggatcac

SEQ ID NO: 35437 - DNA, 20 bp, Artificial Sequence
  Synthetic
actccattaactacctccac

SEQ ID NO: 35438 - DNA, 20 bp, Artificial Sequence
  Synthetic
tcaccagtggaggtagttaa

SEQ ID NO: 35439 - DNA, 20 bp, Artificial Sequence
  Synthetic
agggtcccactcaccagtgg

SEQ ID NO: 35440 - DNA, 20 bp, Artificial Sequence
  Synthetic
cccagggtcccactcaccag

SEQ ID NO: 35441 - DNA, 20 bp, Artificial Sequence
  Synthetic
gcaggggtgagccgaagacc

SEQ ID NO: 35442 - DNA, 20 bp, Artificial Sequence
  Synthetic
ggtgagccgaagacctggta

SEQ ID NO: 35443 - DNA, 20 bp, Artificial Sequence
  Synthetic
gtgagccgaagacctggtat

SEQ ID NO: 35444 - DNA, 20 bp, Artificial Sequence
  Synthetic
tgagccgaagacctggtatg

SEQ ID NO: 35445 - DNA, 20 bp, Artificial Sequence
  Synthetic
ggcaccccataccaggtctt

SEQ ID NO: 35446 - DNA, 20 bp, Artificial Sequence
  Synthetic
aagtgagggcaccccatacc

SEQ ID NO: 35447 - DNA, 20 bp, Artificial Sequence
  Synthetic
aaatgttctgctgcaagtga

SEQ ID NO: 35448 - DNA, 20 bp, Artificial Sequence
  Synthetic
caaatgttctgctgcaagtg

SEQ ID NO: 35449 - DNA, 20 bp, Artificial Sequence
  Synthetic
ctcacttgcagcagaacatt

SEQ ID NO: 35450 - DNA, 20 bp, Artificial Sequence
  Synthetic
ggctggctatcaaatagttc

SEQ ID NO: 35451 - DNA, 20 bp, Artificial Sequence
  Synthetic
gttggtgcaggaggtcaggc

SEQ ID NO: 35452 - DNA, 20 bp, Artificial Sequence
  Synthetic
acaagttggtgcaggaggtc

SEQ ID NO: 35453 - DNA, 20 bp, Artificial Sequence
  Synthetic
gggtgacaagttggtgcagg

SEQ ID NO: 35454 - DNA, 20 bp, Artificial Sequence
  Synthetic
tgagggtgacaagttggtgc

SEQ ID NO: 35455 - DNA, 20 bp, Artificial Sequence
  Synthetic
gattcatgagggtgacaagt

SEQ ID NO: 35456 - DNA, 20 bp, Artificial Sequence
  Synthetic
gagggtgttgggattcatga

SEQ ID NO: 35457 - DNA, 20 bp, Artificial Sequence
  Synthetic
tgagggtgttgggattcatg

SEQ ID NO: 35458 - DNA, 20 bp, Artificial Sequence
  Synthetic
ccatgggacatgagggtgtt

SEQ ID NO: 35459 - DNA, 20 bp, Artificial Sequence
  Synthetic
cccaacaccctcatgtccca

SEQ ID NO: 35460 - DNA, 20 bp, Artificial Sequence
  Synthetic
accatgggacatgagggtgt

SEQ ID NO: 35461 - DNA, 20 bp, Artificial Sequence
  Synthetic
tggcacaccatgggacatga

SEQ ID NO: 35462 - DNA, 20 bp, Artificial Sequence
  Synthetic
ctggcacaccatgggacatg

SEQ ID NO: 35463 - DNA, 20 bp, Artificial Sequence
  Synthetic
ggtactcactggcacaccat

SEQ ID NO: 35464 - DNA, 20 bp, Artificial Sequence
  Synthetic
gggtactcactggcacacca

SEQ ID NO: 35465 - DNA, 20 bp, Artificial Sequence
  Synthetic
gtccgcacaaaccagtgtgc

SEQ ID NO: 35466 - DNA, 20 bp, Artificial Sequence
  Synthetic
ctcctgcacactggtttgtg

SEQ ID NO: 35467 - DNA, 20 bp, Artificial Sequence
  Synthetic
tgacaaactctcctgcacac

SEQ ID NO: 35468 - DNA, 20 bp, Artificial Sequence
  Synthetic
gctgtggtaagcacggggga

SEQ ID NO: 35469 - DNA, 20 bp, Artificial Sequence
  Synthetic
ttcccccgtgcttaccacag

SEQ ID NO: 35470 - DNA, 20 bp, Artificial Sequence
  Synthetic
agccgctgtggtaagcacgg

SEQ ID NO: 35471 - DNA, 20 bp, Artificial Sequence
  Synthetic
aagccgctgtggtaagcacg

SEQ ID NO: 35472 - DNA, 20 bp, Artificial Sequence
  Synthetic
gaagccgctgtggtaagcac

SEQ ID NO: 35473 - DNA, 20 bp, Artificial Sequence
  Synthetic
tgaagccgctgtggtaagca

SEQ ID NO: 35474 - DNA, 20 bp, Artificial Sequence
  Synthetic
taccacagcggcttcaacca

SEQ ID NO: 35475 - DNA, 20 bp, Artificial Sequence
  Synthetic
agccttggttgaagccgctg

SEQ ID NO: 35476 - DNA, 20 bp, Artificial Sequence
  Synthetic
cctcggcaaagttgtagcct

SEQ ID NO: 35477 - DNA, 20 bp, Artificial Sequence
  Synthetic
ccaaggctacaactttgccg

SEQ ID NO: 35478 - DNA, 20 bp, Artificial Sequence
  Synthetic
agtgcaaaagttgacagcct

SEQ ID NO: 35479 - DNA, 20 bp, Artificial Sequence
  Synthetic
gttcagtttcactctcgtct

SEQ ID NO: 35480 - DNA, 20 bp, Artificial Sequence
  Synthetic
agttcagtttcactctcgtc

SEQ ID NO: 35481 - DNA, 20 bp, Artificial Sequence
  Synthetic
gagagtgaaactgaactact

SEQ ID NO: 35482 - DNA, 20 bp, Artificial Sequence
  Synthetic
tggaccagattgccaaattc

SEQ ID NO: 35483 - DNA, 20 bp, Artificial Sequence
  Synthetic
ggaccagattgccaaattct

SEQ ID NO: 35484 - DNA, 20 bp, Artificial Sequence
  Synthetic
tttcccagaatttggcaatc

SEQ ID NO: 35485 - DNA, 20 bp, Artificial Sequence
  Synthetic
tgccaaattctgggaaatcc

SEQ ID NO: 35486 - DNA, 20 bp, Artificial Sequence
  Synthetic
gccaaattctgggaaatcca

SEQ ID NO: 35487 - DNA, 20 bp, Artificial Sequence
  Synthetic
gccctggatttcccagaatt

SEQ ID NO: 35488 - DNA, 20 bp, Artificial Sequence
  Synthetic
gaatctttaaggaggagccc

SEQ ID NO: 35489 - DNA, 20 bp, Artificial Sequence
  Synthetic
tacattgggaatctttaagg

SEQ ID NO: 35490 - DNA, 20 bp, Artificial Sequence
  Synthetic
ttctacattgggaatcttta

SEQ ID NO: 35491 - DNA, 20 bp, Artificial Sequence
  Synthetic
taaagattcccaatgtagaa

SEQ ID NO: 35492 - DNA, 20 bp, Artificial Sequence
  Synthetic
agattcccaatgtagaacgg

SEQ ID NO: 35493 - DNA, 20 bp, Artificial Sequence
  Synthetic
aagatccgccgttctacatt

SEQ ID NO: 35494 - DNA, 20 bp, Artificial Sequence
  Synthetic
caagatccgccgttctacat

SEQ ID NO: 35495 - DNA, 20 bp, Artificial Sequence
  Synthetic
caatgtagaacggcggatct

SEQ ID NO: 35496 - DNA, 20 bp, Artificial Sequence
  Synthetic
ttactttgctgagactgtag

SEQ ID NO: 35497 - DNA, 20 bp, Artificial Sequence
  Synthetic
ctacttgttttttcagattg

SEQ ID NO: 35498 - DNA, 20 bp, Artificial Sequence
  Synthetic
cttgttttttcagattgtgg

SEQ ID NO: 35499 - DNA, 20 bp, Artificial Sequence
  Synthetic
gttttttcagattgtggtgg

SEQ ID NO: 35500 - DNA, 20 bp, Artificial Sequence
  Synthetic
tttcagattgtggtggagga

SEQ ID NO: 35501 - DNA, 20 bp, Artificial Sequence
  Synthetic
cagattgtggtggaggaagg

SEQ ID NO: 35502 - DNA, 20 bp, Artificial Sequence
  Synthetic
tggttatgaagctatctgca

SEQ ID NO: 35503 - DNA, 20 bp, Artificial Sequence
  Synthetic
aagctatctgcaaggaccgt

SEQ ID NO: 35504 - DNA, 20 bp, Artificial Sequence
  Synthetic
ctatctgcaaggaccgtcgg

SEQ ID NO: 35505 - DNA, 20 bp, Artificial Sequence
  Synthetic
tatctgcaaggaccgtcggt

SEQ ID NO: 35506 - DNA, 20 bp, Artificial Sequence
  Synthetic
gcaaggaccgtcggtgggct

SEQ ID NO: 35507 - DNA, 20 bp, Artificial Sequence
  Synthetic
caaggaccgtcggtgggctc

SEQ ID NO: 35508 - DNA, 20 bp, Artificial Sequence
  Synthetic
gggctacccgagcccaccga

SEQ ID NO: 35509 - DNA, 20 bp, Artificial Sequence
  Synthetic
tggtggatagttgaggcgct

SEQ ID NO: 35510 - DNA, 20 bp, Artificial Sequence
  Synthetic
ctggtggatagttgaggcgc

SEQ ID NO: 35511 - DNA, 20 bp, Artificial Sequence
  Synthetic
cagcgcctcaactatccacc

SEQ ID NO: 35512 - DNA, 20 bp, Artificial Sequence
  Synthetic
ttttgcctggtggatagttg

SEQ ID NO: 35513 - DNA, 20 bp, Artificial Sequence
  Synthetic
tatccaccaggcaaaaatat

SEQ ID NO: 35514 - DNA, 20 bp, Artificial Sequence
  Synthetic
gagccaatatttttgcctgg

SEQ ID NO: 35515 - DNA, 20 bp, Artificial Sequence
  Synthetic
aaggagccaatatttttgcc

SEQ ID NO: 35516 - DNA, 20 bp, Artificial Sequence
  Synthetic
ttcgtagtgggagcgtagca

SEQ ID NO: 35517 - DNA, 20 bp, Artificial Sequence
  Synthetic
ataaacaatgcgttcgtagt

SEQ ID NO: 35518 - DNA, 20 bp, Artificial Sequence
  Synthetic
gataaacaatgcgttcgtag

SEQ ID NO: 35519 - DNA, 20 bp, Artificial Sequence
  Synthetic
ccagactggtacatttcata

SEQ ID NO: 35520 - DNA, 20 bp, Artificial Sequence
  Synthetic
tccagactggtacatttcat

SEQ ID NO: 35521 - DNA, 20 bp, Artificial Sequence
  Synthetic
gcccggtgttcgagcctagc

SEQ ID NO: 35522 - DNA, 20 bp, Artificial Sequence
  Synthetic
cccagctaggctcgaacacc

SEQ ID NO: 35523 - DNA, 20 bp, Artificial Sequence
  Synthetic
cccggtgttcgagcctagct

SEQ ID NO: 35524 - DNA, 20 bp, Artificial Sequence
  Synthetic
gcccagctaggctcgaacac

SEQ ID NO: 35525 - DNA, 20 bp, Artificial Sequence
  Synthetic
tctcggaactcggcccagct

SEQ ID NO: 35526 - DNA, 20 bp, Artificial Sequence
  Synthetic
gccgagttccgagaccctct

SEQ ID NO: 35527 - DNA, 20 bp, Artificial Sequence
  Synthetic
gccaagagggtctcggaact

SEQ ID NO: 35528 - DNA, 20 bp, Artificial Sequence
  Synthetic
cgatgtagccaagagggtct

SEQ ID NO: 35529 - DNA, 20 bp, Artificial Sequence
  Synthetic
ttttcgcgatgtagccaaga

SEQ ID NO: 35530 - DNA, 20 bp, Artificial Sequence
  Synthetic
attttcgcgatgtagccaag

SEQ ID NO: 35531 - DNA, 20 bp, Artificial Sequence
  Synthetic
ttggctacatcgcgaaaatc

SEQ ID NO: 35532 - DNA, 20 bp, Artificial Sequence
  Synthetic
caggcccatcgcagagaaat

SEQ ID NO: 35533 - DNA, 20 bp, Artificial Sequence
  Synthetic
aggcccatcgcagagaaatc

SEQ ID NO: 35534 - DNA, 20 bp, Artificial Sequence
  Synthetic
atgcccgatttctctgcgat

SEQ ID NO: 35535 - DNA, 20 bp, Artificial Sequence
  Synthetic
aatgcccgatttctctgcga

SEQ ID NO: 35536 - DNA, 20 bp, Artificial Sequence
  Synthetic
cggggcttaccgcgggtggg

SEQ ID NO: 35537 - DNA, 20 bp, Artificial Sequence
  Synthetic
ccgacttctatctgtgtgtg

SEQ ID NO: 35538 - DNA, 20 bp, Artificial Sequence
  Synthetic
cgacttctatctgtgtgtgt

SEQ ID NO: 35539 - DNA, 20 bp, Artificial Sequence
  Synthetic
ttctatctgtgtgtgtgggc

SEQ ID NO: 35540 - DNA, 20 bp, Artificial Sequence
  Synthetic
gtgtgtgggcaggtgccagc

SEQ ID NO: 35541 - DNA, 20 bp, Artificial Sequence
  Synthetic
tgtgtgggcaggtgccagct

SEQ ID NO: 35542 - DNA, 20 bp, Artificial Sequence
  Synthetic
gtgtgggcaggtgccagctg

SEQ ID NO: 35543 - DNA, 20 bp, Artificial Sequence
  Synthetic
tgggcaggtgccagctgggg

SEQ ID NO: 35544 - DNA, 20 bp, Artificial Sequence
  Synthetic
gggcaggtgccagctggggt

SEQ ID NO: 35545 - DNA, 20 bp, Artificial Sequence
  Synthetic
tgcagaactcccaccccagc

SEQ ID NO: 35546 - DNA, 20 bp, Artificial Sequence
  Synthetic
tctgcagtgtgacctgtgtc

SEQ ID NO: 35547 - DNA, 20 bp, Artificial Sequence
  Synthetic
agtgtgacctgtgtcaggac

SEQ ID NO: 35548 - DNA, 20 bp, Artificial Sequence
  Synthetic
catggaaccagtcctgacac

SEQ ID NO: 35549 - DNA, 20 bp, Artificial Sequence
  Synthetic
ctgtgtcaggactggttcca

SEQ ID NO: 35550 - DNA, 20 bp, Artificial Sequence
  Synthetic
tgtgtcaggactggttccat

SEQ ID NO: 35551 - DNA, 20 bp, Artificial Sequence
  Synthetic
gcactgacacacactgccca

SEQ ID NO: 35552 - DNA, 20 bp, Artificial Sequence
  Synthetic
tttggagaggtgaggagatg

SEQ ID NO: 35553 - DNA, 20 bp, Artificial Sequence
  Synthetic
ctttggagaggtgaggagat

SEQ ID NO: 35554 - DNA, 20 bp, Artificial Sequence
  Synthetic
gctttggagaggtgaggaga

SEQ ID NO: 35555 - DNA, 20 bp, Artificial Sequence
  Synthetic
gactgggctttggagaggtg

SEQ ID NO: 35556 - DNA, 20 bp, Artificial Sequence
  Synthetic
agtgagactgggctttggag

SEQ ID NO: 35557 - DNA, 20 bp, Artificial Sequence
  Synthetic
gatgaagtgagactgggctt

SEQ ID NO: 35558 - DNA, 20 bp, Artificial Sequence
  Synthetic
agtggagatgaagtgagact

SEQ ID NO: 35559 - DNA, 20 bp, Artificial Sequence
  Synthetic
cagtggagatgaagtgagac

SEQ ID NO: 35560 - DNA, 20 bp, Artificial Sequence
  Synthetic
cttcatctccactgctagcc

SEQ ID NO: 35561 - DNA, 20 bp, Artificial Sequence
  Synthetic
catctccactgctagcctgg

SEQ ID NO: 35562 - DNA, 20 bp, Artificial Sequence
  Synthetic
atctccactgctagcctggt

SEQ ID NO: 35563 - DNA, 20 bp, Artificial Sequence
  Synthetic
cattcccaccaggctagcag

SEQ ID NO: 35564 - DNA, 20 bp, Artificial Sequence
  Synthetic
cactgctagcctggtgggaa

SEQ ID NO: 35565 - DNA, 20 bp, Artificial Sequence
  Synthetic
actgctagcctggtgggaat

SEQ ID NO: 35566 - DNA, 20 bp, Artificial Sequence
  Synthetic
ttttgtgtcccattcccacc

SEQ ID NO: 35567 - DNA, 20 bp, Artificial Sequence
  Synthetic
agcgcatacacagtggacac

SEQ ID NO: 35568 - DNA, 20 bp, Artificial Sequence
  Synthetic
cgtcgtgagcgcatacacag

SEQ ID NO: 35569 - DNA, 20 bp, Artificial Sequence
  Synthetic
atttgccaagtatgctcccg

SEQ ID NO: 35570 - DNA, 20 bp, Artificial Sequence
  Synthetic
tttgccaagtatgctcccgt

SEQ ID NO: 35571 - DNA, 20 bp, Artificial Sequence
  Synthetic
ttgccaagtatgctcccgtg

SEQ ID NO: 35572 - DNA, 20 bp, Artificial Sequence
  Synthetic
catccccacgggagcatact

SEQ ID NO: 35573 - DNA, 20 bp, Artificial Sequence
  Synthetic
cttatcatcttcatccccac

SEQ ID NO: 35574 - DNA, 20 bp, Artificial Sequence
  Synthetic
gcttatcatcttcatcccca

SEQ ID NO: 35575 - DNA, 20 bp, Artificial Sequence
  Synthetic
gataagcttcttttctgtga

SEQ ID NO: 35576 - DNA, 20 bp, Artificial Sequence
  Synthetic
gtggtaacaagcagaagatg

SEQ ID NO: 35577 - DNA, 20 bp, Artificial Sequence
  Synthetic
ctggggatttcaggaagggg

SEQ ID NO: 35578 - DNA, 20 bp, Artificial Sequence
  Synthetic
cctctggggatttcaggaag

SEQ ID NO: 35579 - DNA, 20 bp, Artificial Sequence
  Synthetic
ccccttcctgaaatccccag

SEQ ID NO: 35580 - DNA, 20 bp, Artificial Sequence
  Synthetic
gcctctggggatttcaggaa

SEQ ID NO: 35581 - DNA, 20 bp, Artificial Sequence
  Synthetic
tgcctctggggatttcagga

SEQ ID NO: 35582 - DNA, 20 bp, Artificial Sequence
  Synthetic
cagatgcctctggggatttc

SEQ ID NO: 35583 - DNA, 20 bp, Artificial Sequence
  Synthetic
ctgaaatccccagaggcatc

SEQ ID NO: 35584 - DNA, 20 bp, Artificial Sequence
  Synthetic
aaatccccagaggcatctgg

SEQ ID NO: 35585 - DNA, 20 bp, Artificial Sequence
  Synthetic
ggcacctccagatgcctctg

SEQ ID NO: 35586 - DNA, 20 bp, Artificial Sequence
  Synthetic
gggcacctccagatgcctct

SEQ ID NO: 35587 - DNA, 20 bp, Artificial Sequence
  Synthetic
tgggcacctccagatgcctc

SEQ ID NO: 35588 - DNA, 20 bp, Artificial Sequence
  Synthetic
gaggtgcccaaaatgtatct

SEQ ID NO: 35589 - DNA, 20 bp, Artificial Sequence
  Synthetic
ttaccgccaagatacatttt

SEQ ID NO: 35590 - DNA, 20 bp, Artificial Sequence
  Synthetic
cttaccgccaagatacattt

SEQ ID NO: 35591 - DNA, 20 bp, Artificial Sequence
  Synthetic
gaaggtgccctggctgtacg

SEQ ID NO: 35592 - DNA, 20 bp, Artificial Sequence
  Synthetic
aaggtgccctggctgtacgt

SEQ ID NO: 35593 - DNA, 20 bp, Artificial Sequence
  Synthetic
gccctggctgtacgtgggca

SEQ ID NO: 35594 - DNA, 20 bp, Artificial Sequence
  Synthetic
accatgcccacgtacagcca

SEQ ID NO: 35595 - DNA, 20 bp, Artificial Sequence
  Synthetic
aaccatgcccacgtacagcc

SEQ ID NO: 35596 - DNA, 20 bp, Artificial Sequence
  Synthetic
tggttttctcagcattttgt

SEQ ID NO: 35597 - DNA, 20 bp, Artificial Sequence
  Synthetic
agcattttgttggcatattg

SEQ ID NO: 35598 - DNA, 20 bp, Artificial Sequence
  Synthetic
gttggcatattgaggatcac

SEQ ID NO: 35599 - DNA, 20 bp, Artificial Sequence
  Synthetic
actctattaactatctgcat

SEQ ID NO: 35600 - DNA, 20 bp, Artificial Sequence
  Synthetic
gcaggggtgagccgaagacc

SEQ ID NO: 35601 - DNA, 20 bp, Artificial Sequence
  Synthetic
ggtgagccgaagacctggta

SEQ ID NO: 35602 - DNA, 20 bp, Artificial Sequence
  Synthetic
ggtacaccataccaggtctt

SEQ ID NO: 35603 - DNA, 20 bp, Artificial Sequence
  Synthetic
cagggagggtacaccatacc

SEQ ID NO: 35604 - DNA, 20 bp, Artificial Sequence
  Synthetic
ctggtatggtgtaccctccc

SEQ ID NO: 35605 - DNA, 20 bp, Artificial Sequence
  Synthetic
aaatgctctgctgccaggga

SEQ ID NO: 35606 - DNA, 20 bp, Artificial Sequence
  Synthetic
caaatgctctgctgccaggg

SEQ ID NO: 35607 - DNA, 20 bp, Artificial Sequence
  Synthetic
ctccctggcagcagagcatt

SEQ ID NO: 35608 - DNA, 20 bp, Artificial Sequence
  Synthetic
ctccaaatgctctgctgcca

SEQ ID NO: 35609 - DNA, 20 bp, Artificial Sequence
  Synthetic
cctccaaatgctctgctgcc

SEQ ID NO: 35610 - DNA, 20 bp, Artificial Sequence
  Synthetic
cctggcagcagagcatttgg

SEQ ID NO: 35611 - DNA, 20 bp, Artificial Sequence
  Synthetic
ggcagcagagcatttggagg

SEQ ID NO: 35612 - DNA, 20 bp, Artificial Sequence
  Synthetic
ggctggctatcaaacagctc

SEQ ID NO: 35613 - DNA, 20 bp, Artificial Sequence
  Synthetic
gctggtgtaggagatcaggc

SEQ ID NO: 35614 - DNA, 20 bp, Artificial Sequence
  Synthetic
acaagctggtgtaggagatc

SEQ ID NO: 35615 - DNA, 20 bp, Artificial Sequence
  Synthetic
tgagagtgacaagctggtgt

SEQ ID NO: 35616 - DNA, 20 bp, Artificial Sequence
  Synthetic
gattcatgagagtgacaagc

SEQ ID NO: 35617 - DNA, 20 bp, Artificial Sequence
  Synthetic
ccatgggacatcaaagtgtt

SEQ ID NO: 35618 - DNA, 20 bp, Artificial Sequence
  Synthetic
cccaacactttgatgtccca

SEQ ID NO: 35619 - DNA, 20 bp, Artificial Sequence
  Synthetic
accatgggacatcaaagtgt

SEQ ID NO: 35620 - DNA, 20 bp, Artificial Sequence
  Synthetic
ggtacttactggcacaccat

SEQ ID NO: 35621 - DNA, 20 bp, Artificial Sequence
  Synthetic
tggtacttactggcacacca

SEQ ID NO: 35622 - DNA, 20 bp, Artificial Sequence
  Synthetic
gtccgcacaaaccagtgtgc

SEQ ID NO: 35623 - DNA, 20 bp, Artificial Sequence
  Synthetic
tccgcacaaaccagtgtgca

SEQ ID NO: 35624 - DNA, 20 bp, Artificial Sequence
  Synthetic
cccctgcacactggtttgtg

SEQ ID NO: 35625 - DNA, 20 bp, Artificial Sequence
  Synthetic
ccgcacaaaccagtgtgcag

SEQ ID NO: 35626 - DNA, 20 bp, Artificial Sequence
  Synthetic
tgacaaactcccctgcacac

SEQ ID NO: 35627 - DNA, 20 bp, Artificial Sequence
  Synthetic
tttcctcgtgcttaccacag

SEQ ID NO: 35628 - DNA, 20 bp, Artificial Sequence
  Synthetic
aaaccactgtggtaagcacg

SEQ ID NO: 35629 - DNA, 20 bp, Artificial Sequence
  Synthetic
taccacagtggttttaacca

SEQ ID NO: 35630 - DNA, 20 bp, Artificial Sequence
  Synthetic
agccttggttaaaaccactg

SEQ ID NO: 35631 - DNA, 20 bp, Artificial Sequence
  Synthetic
cttcagcaaaattgtagcct

SEQ ID NO: 35632 - DNA, 20 bp, Artificial Sequence
  Synthetic
atttcactctagtttgggcc

SEQ ID NO: 35633 - DNA, 20 bp, Artificial Sequence
  Synthetic
gttcaatttcactctagttt

SEQ ID NO: 35634 - DNA, 20 bp, Artificial Sequence
  Synthetic
agttcaatttcactctagtt

SEQ ID NO: 35635 - DNA, 20 bp, Artificial Sequence
  Synthetic
tagagtgaaattgaactatt

SEQ ID NO: 35636 - DNA, 20 bp, Artificial Sequence
  Synthetic
tggatcagattgcaaaattc

SEQ ID NO: 35637 - DNA, 20 bp, Artificial Sequence
  Synthetic
ggatcagattgcaaaattct

SEQ ID NO: 35638 - DNA, 20 bp, Artificial Sequence
  Synthetic
gcaaaattctgggaaattca

SEQ ID NO: 35639 - DNA, 20 bp, Artificial Sequence
  Synthetic
cacattgggaatctttaaag

SEQ ID NO: 35640 - DNA, 20 bp, Artificial Sequence
  Synthetic
ctctttaaagattcccaatg

SEQ ID NO: 35641 - DNA, 20 bp, Artificial Sequence
  Synthetic
taaagattcccaatgtggag

SEQ ID NO: 35642 - DNA, 20 bp, Artificial Sequence
  Synthetic
aagatcttccgctccacatt

SEQ ID NO: 35643 - DNA, 20 bp, Artificial Sequence
  Synthetic
caagatcttccgctccacat

SEQ ID NO: 35644 - DNA, 20 bp, Artificial Sequence
  Synthetic
caatgtggagcggaagatct

SEQ ID NO: 35645 - DNA, 20 bp, Artificial Sequence
  Synthetic
ggacctctacagccttagta

SEQ ID NO: 35646 - DNA, 20 bp, Artificial Sequence
  Synthetic
ttaccttactaaggctgtag

SEQ ID NO: 35647 - DNA, 20 bp, Artificial Sequence
  Synthetic
agactactcttaccttacta

SEQ ID NO: 35648 - DNA, 20 bp, Artificial Sequence
  Synthetic
atactttcagattgtgattg

SEQ ID NO: 35649 - DNA, 20 bp, Artificial Sequence
  Synthetic
tttcagattgtgattgagga

SEQ ID NO: 35650 - DNA, 20 bp, Artificial Sequence
  Synthetic
cagattgtgattgaggaagg

SEQ ID NO: 35651 - DNA, 20 bp, Artificial Sequence
  Synthetic
tggctatgaagccatctgca

SEQ ID NO: 35652 - DNA, 20 bp, Artificial Sequence
  Synthetic
aagccatctgcaaggatcgt

SEQ ID NO: 35653 - DNA, 20 bp, Artificial Sequence
  Synthetic
ccaccgacgatccttgcaga

SEQ ID NO: 35654 - DNA, 20 bp, Artificial Sequence
  Synthetic
ccatctgcaaggatcgtcgg

SEQ ID NO: 35655 - DNA, 20 bp, Artificial Sequence
  Synthetic
catctgcaaggatcgtcggt

SEQ ID NO: 35656 - DNA, 20 bp, Artificial Sequence
  Synthetic
tggtgggtagtggagacgct

SEQ ID NO: 35657 - DNA, 20 bp, Artificial Sequence
  Synthetic
ctggtgggtagtggagacgc

SEQ ID NO: 35658 - DNA, 20 bp, Artificial Sequence
  Synthetic
cagcgtctccactacccacc

SEQ ID NO: 35659 - DNA, 20 bp, Artificial Sequence
  Synthetic
tgtttttgcctggtgggtag

SEQ ID NO: 35660 - DNA, 20 bp, Artificial Sequence
  Synthetic
tacccaccaggcaaaaacat

SEQ ID NO: 35661 - DNA, 20 bp, Artificial Sequence
  Synthetic
agccaatgtttttgcctggt

SEQ ID NO: 35662 - DNA, 20 bp, Artificial Sequence
  Synthetic
gagccaatgtttttgcctgg

SEQ ID NO: 35663 - DNA, 20 bp, Artificial Sequence
  Synthetic
agggagccaatgtttttgcc

SEQ ID NO: 35664 - DNA, 20 bp, Artificial Sequence
  Synthetic
ttcgtaatgtgatcgtagca

SEQ ID NO: 35665 - DNA, 20 bp, Artificial Sequence
  Synthetic
gttcgtaatgtgatcgtagc

SEQ ID NO: 35666 - DNA, 20 bp, Artificial Sequence
  Synthetic
cagactgaaacatttcatag

SEQ ID NO: 35667 - DNA, 20 bp, Artificial Sequence
  Synthetic
ccagactgaaacatttcata

SEQ ID NO: 35668 - DNA, 20 bp, Artificial Sequence
  Synthetic
tccagactgaaacatttcat

SEQ ID NO: 35669 - DNA, 20 bp, Artificial Sequence
  Synthetic
gcccggtttttgagcctagc

SEQ ID NO: 35670 - DNA, 20 bp, Artificial Sequence
  Synthetic
cccagctaggctcaaaaacc

SEQ ID NO: 35671 - DNA, 20 bp, Artificial Sequence
  Synthetic
cccggtttttgagcctagct

SEQ ID NO: 35672 - DNA, 20 bp, Artificial Sequence
  Synthetic
gcccagctaggctcaaaaac

SEQ ID NO: 35673 - DNA, 20 bp, Artificial Sequence
  Synthetic
tcttggaattcagcccagct

SEQ ID NO: 35674 - DNA, 20 bp, Artificial Sequence
  Synthetic
gctgaattccaagacccgct

SEQ ID NO: 35675 - DNA, 20 bp, Artificial Sequence
  Synthetic
caatgtagccaagcgggtct

SEQ ID NO: 35676 - DNA, 20 bp, Artificial Sequence
  Synthetic
ttttcgcaatgtagccaagc

SEQ ID NO: 35677 - DNA, 20 bp, Artificial Sequence
  Synthetic
attttcgcaatgtagccaag

SEQ ID NO: 35678 - DNA, 20 bp, Artificial Sequence
  Synthetic
ttggctacattgcgaaaata

SEQ ID NO: 35679 - DNA, 20 bp, Artificial Sequence
  Synthetic
aggcccatagcagagaagtc

SEQ ID NO: 35680 - DNA, 20 bp, Artificial Sequence
  Synthetic
atgccagacttctctgctat

SEQ ID NO: 35681 - DNA, 20 bp, Artificial Sequence
  Synthetic
gatgccagacttctctgcta

SEQ ID NO: 35682 - DNA, 20 bp, Artificial Sequence
  Synthetic
aaagacttaccgcgggtggg

SEQ ID NO: 35683 - DNA, 20 bp, Artificial Sequence
  Synthetic
caactatacatgaaagttcc

SEQ ID NO: 35684 - DNA, 20 bp, Artificial Sequence
  Synthetic
aactatacatgaaagttcca

SEQ ID NO: 35685 - DNA, 20 bp, Artificial Sequence
  Synthetic
gttccagggagcagaacacc

SEQ ID NO: 35686 - DNA, 20 bp, Artificial Sequence
  Synthetic
ttacctggtgttctgctccc

SEQ ID NO: 35687 - DNA, 20 bp, Artificial Sequence
  Synthetic
ttttcacatttcaggtcatc

SEQ ID NO: 35688 - DNA, 20 bp, Artificial Sequence
  Synthetic
tgttcagttaacataaatat

SEQ ID NO: 35689 - DNA, 20 bp, Artificial Sequence
  Synthetic
gttaacataaatattggccc

SEQ ID NO: 35690 - DNA, 20 bp, Artificial Sequence
  Synthetic
ttggcccaggtgactgtgaa

SEQ ID NO: 35691 - DNA, 20 bp, Artificial Sequence
  Synthetic
caaaccattcacagtcacct

SEQ ID NO: 35692 - DNA, 20 bp, Artificial Sequence
  Synthetic
acaaaccattcacagtcacc

SEQ ID NO: 35693 - DNA, 20 bp, Artificial Sequence
  Synthetic
gaatggtttgttgttcctga

SEQ ID NO: 35694 - DNA, 20 bp, Artificial Sequence
  Synthetic
ttgttgttcctgaaggttac

SEQ ID NO: 35695 - DNA, 20 bp, Artificial Sequence
  Synthetic
tgttgttcctgaaggttact

SEQ ID NO: 35696 - DNA, 20 bp, Artificial Sequence
  Synthetic
gttgttcctgaaggttactg

SEQ ID NO: 35697 - DNA, 20 bp, Artificial Sequence
  Synthetic
agaacaccccagtaaccttc

SEQ ID NO: 35698 - DNA, 20 bp, Artificial Sequence
  Synthetic
gaatgacttctgtgaaaagt

SEQ ID NO: 35699 - DNA, 20 bp, Artificial Sequence
  Synthetic
aaataatttgaatttcctaa

SEQ ID NO: 35700 - DNA, 20 bp, Artificial Sequence
  Synthetic
aataatttgaatttcctaat

SEQ ID NO: 35701 - DNA, 20 bp, Artificial Sequence
  Synthetic
tgaatttcctaatgggttct

SEQ ID NO: 35702 - DNA, 20 bp, Artificial Sequence
  Synthetic
atttcctaatgggttcttgg

SEQ ID NO: 35703 - DNA, 20 bp, Artificial Sequence
  Synthetic
tgggccaccaagaacccatt

SEQ ID NO: 35704 - DNA, 20 bp, Artificial Sequence
  Synthetic
tcataaagatcttcaagatt

SEQ ID NO: 35705 - DNA, 20 bp, Artificial Sequence
  Synthetic
ttcataaagatcttcaagat

SEQ ID NO: 35706 - DNA, 20 bp, Artificial Sequence
  Synthetic
aagcaaatgttccagtgtat

SEQ ID NO: 35707 - DNA, 20 bp, Artificial Sequence
  Synthetic
cgctgaataaacctatacac

SEQ ID NO: 35708 - DNA, 20 bp, Artificial Sequence
  Synthetic
tataggtttattcagcgacc

SEQ ID NO: 35709 - DNA, 20 bp, Artificial Sequence
  Synthetic
tattcagcgacctggagatt

SEQ ID NO: 35710 - DNA, 20 bp, Artificial Sequence
  Synthetic
agcgacctggagatttggtc

SEQ ID NO: 35711 - DNA, 20 bp, Artificial Sequence
  Synthetic
tttatccagaccaaatctcc

SEQ ID NO: 35712 - DNA, 20 bp, Artificial Sequence
  Synthetic
gatttggtctggataaatgc

SEQ ID NO: 35713 - DNA, 20 bp, Artificial Sequence
  Synthetic
taaatgcaggcactgttcat

SEQ ID NO: 35714 - DNA, 20 bp, Artificial Sequence
  Synthetic
aaatgcaggcactgttcatt

SEQ ID NO: 35715 - DNA, 20 bp, Artificial Sequence
  Synthetic
aggcactgttcattgggttc

SEQ ID NO: 35716 - DNA, 20 bp, Artificial Sequence
  Synthetic
gttcattgggttcaggctat

SEQ ID NO: 35717 - DNA, 20 bp, Artificial Sequence
  Synthetic
attgggttcaggctattggc

SEQ ID NO: 35718 - DNA, 20 bp, Artificial Sequence
  Synthetic
gctggtgcaacaacattgct

SEQ ID NO: 35719 - DNA, 20 bp, Artificial Sequence
  Synthetic
aacaacattgcttggaatgt

SEQ ID NO: 35720 - DNA, 20 bp, Artificial Sequence
  Synthetic
cacggtgcagctgtacatga

SEQ ID NO: 35721 - DNA, 20 bp, Artificial Sequence
  Synthetic
cagctgtacatgaaggtgcc

SEQ ID NO: 35722 - DNA, 20 bp, Artificial Sequence
  Synthetic
gtgcccggcagccgaacgcc

SEQ ID NO: 35723 - DNA, 20 bp, Artificial Sequence
  Synthetic
gcacctggcgttcggctgcc

SEQ ID NO: 35724 - DNA, 20 bp, Artificial Sequence
  Synthetic
cgcacctggcgttcggctgc

SEQ ID NO: 35725 - DNA, 20 bp, Artificial Sequence
  Synthetic
cgtggagcgcacctggcgtt

SEQ ID NO: 35726 - DNA, 20 bp, Artificial Sequence
  Synthetic
gtcgacccctgcaggccacc

SEQ ID NO: 35727 - DNA, 20 bp, Artificial Sequence
  Synthetic
agaagttgttattctcctgg

SEQ ID NO: 35728 - DNA, 20 bp, Artificial Sequence
  Synthetic
agcagaagttgttattctcc

SEQ ID NO: 35729 - DNA, 20 bp, Artificial Sequence
  Synthetic
tgctccgtcaacatcaacat

SEQ ID NO: 35730 - DNA, 20 bp, Artificial Sequence
  Synthetic
tgggccaatgttgatgttga

SEQ ID NO: 35731 - DNA, 20 bp, Artificial Sequence
  Synthetic
gtcaacatcaacattggccc

SEQ ID NO: 35732 - DNA, 20 bp, Artificial Sequence
  Synthetic
ttggcccaggcgactgcgag

SEQ ID NO: 35733 - DNA, 20 bp, Artificial Sequence
  Synthetic
cgaaccactcgcagtcgcct

SEQ ID NO: 35734 - DNA, 20 bp, Artificial Sequence
  Synthetic
gcgaaccactcgcagtcgcc

SEQ ID NO: 35735 - DNA, 20 bp, Artificial Sequence
  Synthetic
aggcgactgcgagtggttcg

SEQ ID NO: 35736 - DNA, 20 bp, Artificial Sequence
  Synthetic
tcgcggtgcacgagcactac

SEQ ID NO: 35737 - DNA, 20 bp, Artificial Sequence
  Synthetic
cgcggtgcacgagcactact

SEQ ID NO: 35738 - DNA, 20 bp, Artificial Sequence
  Synthetic
ccgatcacagaaagcgctga

SEQ ID NO: 35739 - DNA, 20 bp, Artificial Sequence
  Synthetic
ccatcagcgctttctgtgat

SEQ ID NO: 35740 - DNA, 20 bp, Artificial Sequence
  Synthetic
gccaccccgcaggcacggcg

SEQ ID NO: 35741 - DNA, 20 bp, Artificial Sequence
  Synthetic
gcacggcgtggactacttga

SEQ ID NO: 35742 - DNA, 20 bp, Artificial Sequence
  Synthetic
cacggcgtggactacttgac

SEQ ID NO: 35743 - DNA, 20 bp, Artificial Sequence
  Synthetic
tggactacttgacgggttcc

SEQ ID NO: 35744 - DNA, 20 bp, Artificial Sequence
  Synthetic
actacttgacgggttcctgg

SEQ ID NO: 35745 - DNA, 20 bp, Artificial Sequence
  Synthetic
gggttcctggtggccaatcc

SEQ ID NO: 35746 - DNA, 20 bp, Artificial Sequence
  Synthetic
atcatccaggattggccacc

SEQ ID NO: 35747 - DNA, 20 bp, Artificial Sequence
  Synthetic
gcatagagatcatccaggat

SEQ ID NO: 35748 - DNA, 20 bp, Artificial Sequence
  Synthetic
tggatgcatagagatcatcc

SEQ ID NO: 35749 - DNA, 20 bp, Artificial Sequence
  Synthetic
gaagcggtacacaggaatat

SEQ ID NO: 35750 - DNA, 20 bp, Artificial Sequence
  Synthetic
cgctgcacgaagcggtacac

SEQ ID NO: 35751 - DNA, 20 bp, Artificial Sequence
  Synthetic
taccgcttcgtgcagcgacc

SEQ ID NO: 35752 - DNA, 20 bp, Artificial Sequence
  Synthetic
ctccgggtcgctgcacgaag

SEQ ID NO: 35753 - DNA, 20 bp, Artificial Sequence
  Synthetic
agcgacccggagacctcgtg

SEQ ID NO: 35754 - DNA, 20 bp, Artificial Sequence
  Synthetic
ttaatccacacgaggtctcc

SEQ ID NO: 35755 - DNA, 20 bp, Artificial Sequence
  Synthetic
attaatccacacgaggtctc

SEQ ID NO: 35756 - DNA, 20 bp, Artificial Sequence
  Synthetic
agacctcgtgtggattaatg

SEQ ID NO: 35757 - DNA, 20 bp, Artificial Sequence
  Synthetic
gacctcgtgtggattaatgc

SEQ ID NO: 35758 - DNA, 20 bp, Artificial Sequence
  Synthetic
acctcgtgtggattaatgcg

SEQ ID NO: 35759 - DNA, 20 bp, Artificial Sequence
  Synthetic
tccccgcattaatccacacg

SEQ ID NO: 35760 - DNA, 20 bp, Artificial Sequence
  Synthetic
ttaatgcggggactgtgcac

SEQ ID NO: 35761 - DNA, 20 bp, Artificial Sequence
  Synthetic
taatgcggggactgtgcact

SEQ ID NO: 35762 - DNA, 20 bp, Artificial Sequence
  Synthetic
ggggactgtgcactgggtgc

SEQ ID NO: 35763 - DNA, 20 bp, Artificial Sequence
  Synthetic
gtgcactgggtgcaggccac

SEQ ID NO: 35764 - DNA, 20 bp, Artificial Sequence
  Synthetic
actgggtgcaggccaccggc

SEQ ID NO: 35765 - DNA, 20 bp, Artificial Sequence
  Synthetic
aatgttgttgcaccagccgg

SEQ ID NO: 35766 - DNA, 20 bp, Artificial Sequence
  Synthetic
ggcaatgttgttgcaccagc

SEQ ID NO: 35767 - DNA, 20 bp, Artificial Sequence
  Synthetic
gctggtgcaacaacattgcc

SEQ ID NO: 35768 - DNA, 20 bp, Artificial Sequence
  Synthetic
caacaacattgcctggaacg

SEQ ID NO: 35769 - DNA, 20 bp, Artificial Sequence
  Synthetic
aacaacattgcctggaacgt

SEQ ID NO: 35770 - DNA, 20 bp, Artificial Sequence
  Synthetic
acaacattgcctggaacgtg

SEQ ID NO: 35771 - DNA, 20 bp, Artificial Sequence
  Synthetic
ggtgaggggccccacgttcc

SEQ ID NO: 35772 - DNA, 20 bp, Artificial Sequence
  Synthetic
cgcccgtgtactgtgtgtgc

SEQ ID NO: 35773 - DNA, 20 bp, Artificial Sequence
  Synthetic
ctgccggcacacacagtaca

SEQ ID NO: 35774 - DNA, 20 bp, Artificial Sequence
  Synthetic
ggttcacgtcgtacggctgc

SEQ ID NO: 35775 - DNA, 20 bp, Artificial Sequence
  Synthetic
atgaagcggttcacgtcgta

SEQ ID NO: 35776 - DNA, 20 bp, Artificial Sequence
  Synthetic
tatcgcactcgatcatgaag

SEQ ID NO: 35777 - DNA, 20 bp, Artificial Sequence
  Synthetic
gatcgagtgcgatatctgca

SEQ ID NO: 35778 - DNA, 20 bp, Artificial Sequence
  Synthetic
agtgcgatatctgcaaggac

SEQ ID NO: 35779 - DNA, 20 bp, Artificial Sequence
  Synthetic
atctgcaaggactggttcca

SEQ ID NO: 35780 - DNA, 20 bp, Artificial Sequence
  Synthetic
gcaaggactggttccacggc

SEQ ID NO: 35781 - DNA, 20 bp, Artificial Sequence
  Synthetic
gggggtttatttacctgccg

SEQ ID NO: 35782 - DNA, 20 bp, Artificial Sequence
  Synthetic
ttcctttgtcttagctgtgt

SEQ ID NO: 35783 - DNA, 20 bp, Artificial Sequence
  Synthetic
cacagttgggacagtgatac

SEQ ID NO: 35784 - DNA, 20 bp, Artificial Sequence
  Synthetic
ccatgtaaaactgcacagtt

SEQ ID NO: 35785 - DNA, 20 bp, Artificial Sequence
  Synthetic
accatgtaaaactgcacagt

SEQ ID NO: 35786 - DNA, 20 bp, Artificial Sequence
  Synthetic
tgttcagaaatattgcttaa

SEQ ID NO: 35787 - DNA, 20 bp, Artificial Sequence
  Synthetic
gttcagaaatattgcttaat

SEQ ID NO: 35788 - DNA, 20 bp, Artificial Sequence
  Synthetic
acagatttccacattgactt

SEQ ID NO: 35789 - DNA, 20 bp, Artificial Sequence
  Synthetic
gatttccacattgacttcgg

SEQ ID NO: 35790 - DNA, 20 bp, Artificial Sequence
  Synthetic
aagttccaccgaagtcaatg

SEQ ID NO: 35791 - DNA, 20 bp, Artificial Sequence
  Synthetic
acttcggtggaacttcagtc

SEQ ID NO: 35792 - DNA, 20 bp, Artificial Sequence
  Synthetic
cagtctggtaccatgtcctc

SEQ ID NO: 35793 - DNA, 20 bp, Artificial Sequence
  Synthetic
agtctggtaccatgtcctct

SEQ ID NO: 35794 - DNA, 20 bp, Artificial Sequence
  Synthetic
ccaatcttacccagaggaca

SEQ ID NO: 35795 - DNA, 20 bp, Artificial Sequence
  Synthetic
aataccccaatcttacccag

SEQ ID NO: 35796 - DNA, 20 bp, Artificial Sequence
  Synthetic
aaagccaacagatgaaaatt

SEQ ID NO: 35797 - DNA, 20 bp, Artificial Sequence
  Synthetic
cgtgccaaattttcatctgt

SEQ ID NO: 35798 - DNA, 20 bp, Artificial Sequence
  Synthetic
atttggcacgttatgaatct

SEQ ID NO: 35799 - DNA, 20 bp, Artificial Sequence
  Synthetic
ttcatctgtgacccagagtg

SEQ ID NO: 35800 - DNA, 20 bp, Artificial Sequence
  Synthetic
acccagagtgaggtgttctt

SEQ ID NO: 35801 - DNA, 20 bp, Artificial Sequence
  Synthetic
tccaaagaacacctcactct

SEQ ID NO: 35802 - DNA, 20 bp, Artificial Sequence
  Synthetic
ctccaaagaacacctcactc

SEQ ID NO: 35803 - DNA, 20 bp, Artificial Sequence
  Synthetic
tgaggtgttctttggagata

SEQ ID NO: 35804 - DNA, 20 bp, Artificial Sequence
  Synthetic
ggtgttctttggagataagg

SEQ ID NO: 35805 - DNA, 20 bp, Artificial Sequence
  Synthetic
ggataaatgctacaaatgtg

SEQ ID NO: 35806 - DNA, 20 bp, Artificial Sequence
  Synthetic
ctacaaatgtgtggtaaagc

SEQ ID NO: 35807 - DNA, 20 bp, Artificial Sequence
  Synthetic
tacaaatgtgtggtaaagca

SEQ ID NO: 35808 - DNA, 20 bp, Artificial Sequence
  Synthetic
cataccttatttgttcctac

SEQ ID NO: 35809 - DNA, 20 bp, Artificial Sequence
  Synthetic
cttacctgtaggaacaaata

SEQ ID NO: 35810 - DNA, 20 bp, Artificial Sequence
  Synthetic
gggatgaaaaccttacctgt

SEQ ID NO: 35811 - DNA, 20 bp, Artificial Sequence
  Synthetic
cctgagaagtgagcacagca

SEQ ID NO: 35812 - DNA, 20 bp, Artificial Sequence
  Synthetic
ccatgctgtgctcacttctc

SEQ ID NO: 35813 - DNA, 20 bp, Artificial Sequence
  Synthetic
gctcacttctcaggactgta

SEQ ID NO: 35814 - DNA, 20 bp, Artificial Sequence
  Synthetic
tctcaggactgtatggcttt

SEQ ID NO: 35815 - DNA, 20 bp, Artificial Sequence
  Synthetic
ctcaggactgtatggctttt

SEQ ID NO: 35816 - DNA, 20 bp, Artificial Sequence
  Synthetic
tcaggactgtatggcttttg

SEQ ID NO: 35817 - DNA, 20 bp, Artificial Sequence
  Synthetic
caggactgtatggcttttgg

SEQ ID NO: 35818 - DNA, 20 bp, Artificial Sequence
  Synthetic
aggactgtatggcttttggg

SEQ ID NO: 35819 - DNA, 20 bp, Artificial Sequence
  Synthetic
ctaggtctcccatccatggc

SEQ ID NO: 35820 - DNA, 20 bp, Artificial Sequence
  Synthetic
taggtctcccatccatggcc

SEQ ID NO: 35821 - DNA, 20 bp, Artificial Sequence
  Synthetic
aggtctcccatccatggccg

SEQ ID NO: 35822 - DNA, 20 bp, Artificial Sequence
  Synthetic
tacagaaaagaccccggcca

SEQ ID NO: 35823 - DNA, 20 bp, Artificial Sequence
  Synthetic
ttctcttacagaaaagaccc

SEQ ID NO: 35824 - DNA, 20 bp, Artificial Sequence
  Synthetic
tgtaagagaaacattgatgc

SEQ ID NO: 35825 - DNA, 20 bp, Artificial Sequence
  Synthetic
aaacattgatgcaggtgaga

SEQ ID NO: 35826 - DNA, 20 bp, Artificial Sequence
  Synthetic
gagatggtgattgagtatgc

SEQ ID NO: 35827 - DNA, 20 bp, Artificial Sequence
  Synthetic
gatggagcggatgacgttgc

SEQ ID NO: 35828 - DNA, 20 bp, Artificial Sequence
  Synthetic
gcttgtcagtctggatggag

SEQ ID NO: 35829 - DNA, 20 bp, Artificial Sequence
  Synthetic
gctccatccagactgacaag

SEQ ID NO: 35830 - DNA, 20 bp, Artificial Sequence
  Synthetic
ctccatccagactgacaagc

SEQ ID NO: 35831 - DNA, 20 bp, Artificial Sequence
  Synthetic
ttcccgcttgtcagtctgga

SEQ ID NO: 35832 - DNA, 20 bp, Artificial Sequence
  Synthetic
acttttcccgcttgtcagtc

SEQ ID NO: 35833 - DNA, 20 bp, Artificial Sequence
  Synthetic
ggaaaagtattacgacagca

SEQ ID NO: 35834 - DNA, 20 bp, Artificial Sequence
  Synthetic
cttctgcatgtgcagggcat

SEQ ID NO: 35835 - DNA, 20 bp, Artificial Sequence
  Synthetic
gttccgaattgatgactcag

SEQ ID NO: 35836 - DNA, 20 bp, Artificial Sequence
  Synthetic
ctacctctgagtcatcaatt

SEQ ID NO: 35837 - DNA, 20 bp, Artificial Sequence
  Synthetic
aattgatgactcagaggtag

SEQ ID NO: 35838 - DNA, 20 bp, Artificial Sequence
  Synthetic
gtagtggatgccaccatgca

SEQ ID NO: 35839 - DNA, 20 bp, Artificial Sequence
  Synthetic
tgcagcatttccatgcatgg

SEQ ID NO: 35840 - DNA, 20 bp, Artificial Sequence
  Synthetic
gcgtgcagcatttccatgca

SEQ ID NO: 35841 - DNA, 20 bp, Artificial Sequence
  Synthetic
gtgagcctaactgctattct

SEQ ID NO: 35842 - DNA, 20 bp, Artificial Sequence
  Synthetic
tgagcctaactgctattctc

SEQ ID NO: 35843 - DNA, 20 bp, Artificial Sequence
  Synthetic
atgacccgagaatagcagtt

SEQ ID NO: 35844 - DNA, 20 bp, Artificial Sequence
  Synthetic
tctcgggtcatcaatattga

SEQ ID NO: 35845 - DNA, 20 bp, Artificial Sequence
  Synthetic
ctcgggtcatcaatattgat

SEQ ID NO: 35846 - DNA, 20 bp, Artificial Sequence
  Synthetic
gccatgcgtaagatctaccg

SEQ ID NO: 35847 - DNA, 20 bp, Artificial Sequence
  Synthetic
tcctcggtagatcttacgca

SEQ ID NO: 35848 - DNA, 20 bp, Artificial Sequence
  Synthetic
gcgtaagatctaccgaggag

SEQ ID NO: 35849 - DNA, 20 bp, Artificial Sequence
  Synthetic
cgtaagtgagttcctctcct

SEQ ID NO: 35850 - DNA, 20 bp, Artificial Sequence
  Synthetic
taaagaaaggacgtcgatcg

SEQ ID NO: 35851 - DNA, 20 bp, Artificial Sequence
  Synthetic
agaaaggacgtcgatcgagg

SEQ ID NO: 35852 - DNA, 20 bp, Artificial Sequence
  Synthetic
ggacgtcgatcgaggcggtg

SEQ ID NO: 35853 - DNA, 20 bp, Artificial Sequence
  Synthetic
gacgtcgatcgaggcggtgt

SEQ ID NO: 35854 - DNA, 20 bp, Artificial Sequence
  Synthetic
aggcggtgtgggcagtgtcc

SEQ ID NO: 35855 - DNA, 20 bp, Artificial Sequence
  Synthetic
tgggcagtgtcccggctgcc

SEQ ID NO: 35856 - DNA, 20 bp, Artificial Sequence
  Synthetic
tcccggctgccaggtgcctg

SEQ ID NO: 35857 - DNA, 20 bp, Artificial Sequence
  Synthetic
tcctcaggcacctggcagcc

SEQ ID NO: 35858 - DNA, 20 bp, Artificial Sequence
  Synthetic
gtcctcaggcacctggcagc

SEQ ID NO: 35859 - DNA, 20 bp, Artificial Sequence
  Synthetic
tgccaggtgcctgaggactg

SEQ ID NO: 35860 - DNA, 20 bp, Artificial Sequence
  Synthetic
caccacagtcctcaggcacc

SEQ ID NO: 35861 - DNA, 20 bp, Artificial Sequence
  Synthetic
gtacaaacaccacagtcctc

SEQ ID NO: 35862 - DNA, 20 bp, Artificial Sequence
  Synthetic
tgcttagataagcccaagtt

SEQ ID NO: 35863 - DNA, 20 bp, Artificial Sequence
  Synthetic
ttagataagcccaagtttgg

SEQ ID NO: 35864 - DNA, 20 bp, Artificial Sequence
  Synthetic
atattgcgaccaccaaactt

SEQ ID NO: 35865 - DNA, 20 bp, Artificial Sequence
  Synthetic
tatattgcgaccaccaaact

SEQ ID NO: 35866 - DNA, 20 bp, Artificial Sequence
  Synthetic
cataacatttgtcacagaga

SEQ ID NO: 35867 - DNA, 20 bp, Artificial Sequence
  Synthetic
tcataacatttgtcacagag

SEQ ID NO: 35868 - DNA, 20 bp, Artificial Sequence
  Synthetic
gagagtaagatgatgcaatg

SEQ ID NO: 35869 - DNA, 20 bp, Artificial Sequence
  Synthetic
aatgtggaaagtgtgatcgc

SEQ ID NO: 35870 - DNA, 20 bp, Artificial Sequence
  Synthetic
atgtggaaagtgtgatcgct

SEQ ID NO: 35871 - DNA, 20 bp, Artificial Sequence
  Synthetic
aaagattctcacatttggaa

SEQ ID NO: 35872 - DNA, 20 bp, Artificial Sequence
  Synthetic
tccaaatgtgagaatctttc

SEQ ID NO: 35873 - DNA, 20 bp, Artificial Sequence
  Synthetic
acctgaaagattctcacatt

SEQ ID NO: 35874 - DNA, 20 bp, Artificial Sequence
  Synthetic
atctaatctgccagaaagtg

SEQ ID NO: 35875 - DNA, 20 bp, Artificial Sequence
  Synthetic
caagtgtaggccacactttc

SEQ ID NO: 35876 - DNA, 20 bp, Artificial Sequence
  Synthetic
agtacagttcacacaagtgt

SEQ ID NO: 35877 - DNA, 20 bp, Artificial Sequence
  Synthetic
cttgtgtgaactgtactgag

SEQ ID NO: 35878 - DNA, 20 bp, Artificial Sequence
  Synthetic
tgcaaattctgtcacgtttg

SEQ ID NO: 35879 - DNA, 20 bp, Artificial Sequence
  Synthetic
aattctgtcacgtttgtgga

SEQ ID NO: 35880 - DNA, 20 bp, Artificial Sequence
  Synthetic
cgtttgtggaaggcaacatc

SEQ ID NO: 35881 - DNA, 20 bp, Artificial Sequence
  Synthetic
aaggcaacatcaggctacaa

SEQ ID NO: 35882 - DNA, 20 bp, Artificial Sequence
  Synthetic
tattttcttacagcagctgc

SEQ ID NO: 35883 - DNA, 20 bp, Artificial Sequence
  Synthetic
actcagggtgatagctgttt

SEQ ID NO: 35884 - DNA, 20 bp, Artificial Sequence
  Synthetic
cagctatcaccctgagtgcc

SEQ ID NO: 35885 - DNA, 20 bp, Artificial Sequence
  Synthetic
agctatcaccctgagtgcct

SEQ ID NO: 35886 - DNA, 20 bp, Artificial Sequence
  Synthetic
agtttggtcccaggcactca

SEQ ID NO: 35887 - DNA, 20 bp, Artificial Sequence
  Synthetic
tagtttggtcccaggcactc

SEQ ID NO: 35888 - DNA, 20 bp, Artificial Sequence
  Synthetic
tggtggggtagtttggtccc

SEQ ID NO: 35889 - DNA, 20 bp, Artificial Sequence
  Synthetic
gtgggtttggtggggtagtt

SEQ ID NO: 35890 - DNA, 20 bp, Artificial Sequence
  Synthetic
tcttctttgtgggtttggtg

SEQ ID NO: 35891 - DNA, 20 bp, Artificial Sequence
  Synthetic
ttcttctttgtgggtttggt

SEQ ID NO: 35892 - DNA, 20 bp, Artificial Sequence
  Synthetic
cttcttctttgtgggtttgg

SEQ ID NO: 35893 - DNA, 20 bp, Artificial Sequence
  Synthetic
tttcttcttctttgtgggtt

SEQ ID NO: 35894 - DNA, 20 bp, Artificial Sequence
  Synthetic
cagactttcttcttctttgt

SEQ ID NO: 35895 - DNA, 20 bp, Artificial Sequence
  Synthetic
ccagactttcttcttctttg

SEQ ID NO: 35896 - DNA, 20 bp, Artificial Sequence
  Synthetic
ccacaaagaagaagaaagtc

SEQ ID NO: 35897 - DNA, 20 bp, Artificial Sequence
  Synthetic
cacaaagaagaagaaagtct

SEQ ID NO: 35898 - DNA, 20 bp, Artificial Sequence
  Synthetic
gctcttacagcgaacacact

SEQ ID NO: 35899 - DNA, 20 bp, Artificial Sequence
  Synthetic
agatcagccatccacgggcg

SEQ ID NO: 35900 - DNA, 20 bp, Artificial Sequence
  Synthetic
tacagaacaggcctcgcccg

SEQ ID NO: 35901 - DNA, 20 bp, Artificial Sequence
  Synthetic
cgatgttgcgcttacagaac

SEQ ID NO: 35902 - DNA, 20 bp, Artificial Sequence
  Synthetic
ctgtaagcgcaacatcgacg

SEQ ID NO: 35903 - DNA, 20 bp, Artificial Sequence
  Synthetic
tgtaagcgcaacatcgacgc

SEQ ID NO: 35904 - DNA, 20 bp, Artificial Sequence
  Synthetic
gtaagcgcaacatcgacgcg

SEQ ID NO: 35905 - DNA, 20 bp, Artificial Sequence
  Synthetic
taagcgcaacatcgacgcgg

SEQ ID NO: 35906 - DNA, 20 bp, Artificial Sequence
  Synthetic
caacatcgacgcgggggaga

SEQ ID NO: 35907 - DNA, 20 bp, Artificial Sequence
  Synthetic
gagatggtcatcgagtactc

SEQ ID NO: 35908 - DNA, 20 bp, Artificial Sequence
  Synthetic
ctctggcattgtcatccgct

SEQ ID NO: 35909 - DNA, 20 bp, Artificial Sequence
  Synthetic
gcttgtcagtcaacaccgag

SEQ ID NO: 35910 - DNA, 20 bp, Artificial Sequence
  Synthetic
gctcggtgttgactgacaag

SEQ ID NO: 35911 - DNA, 20 bp, Artificial Sequence
  Synthetic
ctcggtgttgactgacaagc

SEQ ID NO: 35912 - DNA, 20 bp, Artificial Sequence
  Synthetic
aagcgggagaagttctacga

SEQ ID NO: 35913 - DNA, 20 bp, Artificial Sequence
  Synthetic
agcgggagaagttctacgat

SEQ ID NO: 35914 - DNA, 20 bp, Artificial Sequence
  Synthetic
ggagaagttctacgatggga

SEQ ID NO: 35915 - DNA, 20 bp, Artificial Sequence
  Synthetic
gaagttctacgatgggaagg

SEQ ID NO: 35916 - DNA, 20 bp, Artificial Sequence
  Synthetic
aagttctacgatgggaaggt

SEQ ID NO: 35917 - DNA, 20 bp, Artificial Sequence
  Synthetic
acctcatccctgcagggcat

SEQ ID NO: 35918 - DNA, 20 bp, Artificial Sequence
  Synthetic
cctcatccctgcagggcatc

SEQ ID NO: 35919 - DNA, 20 bp, Artificial Sequence
  Synthetic
cgggtgctatatgttccgca

SEQ ID NO: 35920 - DNA, 20 bp, Artificial Sequence
  Synthetic
ctacatcaaagtcatccatg

SEQ ID NO: 35921 - DNA, 20 bp, Artificial Sequence
  Synthetic
catggatgactttgatgtag

SEQ ID NO: 35922 - DNA, 20 bp, Artificial Sequence
  Synthetic
gtagtggacgccacgatgca

SEQ ID NO: 35923 - DNA, 20 bp, Artificial Sequence
  Synthetic
ggcggcattgccatgcatcg

SEQ ID NO: 35924 - DNA, 20 bp, Artificial Sequence
  Synthetic
ggagtggttgatgaagcggg

SEQ ID NO: 35925 - DNA, 20 bp, Artificial Sequence
  Synthetic
acaggagtggttgatgaagc

SEQ ID NO: 35926 - DNA, 20 bp, Artificial Sequence
  Synthetic
cacaggagtggttgatgaag

SEQ ID NO: 35927 - DNA, 20 bp, Artificial Sequence
  Synthetic
agcagttgggctcacaggag

SEQ ID NO: 35928 - DNA, 20 bp, Artificial Sequence
  Synthetic
agagaagcagttgggctcac

SEQ ID NO: 35929 - DNA, 20 bp, Artificial Sequence
  Synthetic
gtgagcccaactgcttctct

SEQ ID NO: 35930 - DNA, 20 bp, Artificial Sequence
  Synthetic
tgagcccaactgcttctctc

SEQ ID NO: 35931 - DNA, 20 bp, Artificial Sequence
  Synthetic
atgacccgagagaagcagtt

SEQ ID NO: 35932 - DNA, 20 bp, Artificial Sequence
  Synthetic
gatgacccgagagaagcagt

SEQ ID NO: 35933 - DNA, 20 bp, Artificial Sequence
  Synthetic
cttctctcgggtcatccacg

SEQ ID NO: 35934 - DNA, 20 bp, Artificial Sequence
  Synthetic
ctctcgggtcatccacgtgg

SEQ ID NO: 35935 - DNA, 20 bp, Artificial Sequence
  Synthetic
tctcgggtcatccacgtgga

SEQ ID NO: 35936 - DNA, 20 bp, Artificial Sequence
  Synthetic
tgtgtttctggccctccacg

SEQ ID NO: 35937 - DNA, 20 bp, Artificial Sequence
  Synthetic
cgaagataacaatgtgtttc

SEQ ID NO: 35938 - DNA, 20 bp, Artificial Sequence
  Synthetic
gccctgcgccgcatcctgcg

SEQ ID NO: 35939 - DNA, 20 bp, Artificial Sequence
  Synthetic
accacgcaggatgcggcgca

SEQ ID NO: 35940 - DNA, 20 bp, Artificial Sequence
  Synthetic
caccacgcaggatgcggcgc

SEQ ID NO: 35941 - DNA, 20 bp, Artificial Sequence
  Synthetic
gcgccgcatcctgcgtggtg

SEQ ID NO: 35942 - DNA, 20 bp, Artificial Sequence
  Synthetic
gctcctcaccacgcaggatg

SEQ ID NO: 35943 - DNA, 20 bp, Artificial Sequence
  Synthetic
aggtgagctcctcaccacgc

SEQ ID NO: 35944 - DNA, 20 bp, Artificial Sequence
  Synthetic
gatggggaacttgtagtcgt

SEQ ID NO: 35945 - DNA, 20 bp, Artificial Sequence
  Synthetic
tcacggcaagaagatgcgca

SEQ ID NO: 35946 - DNA, 20 bp, Artificial Sequence
  Synthetic
aagatgcgcatggctcgatg

SEQ ID NO: 35947 - DNA, 20 bp, Artificial Sequence
  Synthetic
tggctcgatgtggacactgt

SEQ ID NO: 35948 - DNA, 20 bp, Artificial Sequence
  Synthetic
ggctcgatgtggacactgtc

SEQ ID NO: 35949 - DNA, 20 bp, Artificial Sequence
  Synthetic
gctcgatgtggacactgtcg

SEQ ID NO: 35950 - DNA, 20 bp, Artificial Sequence
  Synthetic
tcggggctgcctacgtgtgc

SEQ ID NO: 35951 - DNA, 20 bp, Artificial Sequence
  Synthetic
tgcctacgtgtgcaggactg

SEQ ID NO: 35952 - DNA, 20 bp, Artificial Sequence
  Synthetic
gcctacgtgtgcaggactgt

SEQ ID NO: 35953 - DNA, 20 bp, Artificial Sequence
  Synthetic
acccacagtcctgcacacgt

SEQ ID NO: 35954 - DNA, 20 bp, Artificial Sequence
  Synthetic
cttgtctaggcagttgacac

SEQ ID NO: 35955 - DNA, 20 bp, Artificial Sequence
  Synthetic
tgcctagacaagcccaagtt

SEQ ID NO: 35956 - DNA, 20 bp, Artificial Sequence
  Synthetic
gcctagacaagcccaagttt

SEQ ID NO: 35957 - DNA, 20 bp, Artificial Sequence
  Synthetic
ccccaaacttgggcttgtct

SEQ ID NO: 35958 - DNA, 20 bp, Artificial Sequence
  Synthetic
cctagacaagcccaagtttg

SEQ ID NO: 35959 - DNA, 20 bp, Artificial Sequence
  Synthetic
ctagacaagcccaagtttgg

SEQ ID NO: 35960 - DNA, 20 bp, Artificial Sequence
  Synthetic
gtgttagggcccccaaactt

SEQ ID NO: 35961 - DNA, 20 bp, Artificial Sequence
  Synthetic
ggtgttagggcccccaaact

SEQ ID NO: 35962 - DNA, 20 bp, Artificial Sequence
  Synthetic
agcactgcttcttggtgtta

SEQ ID NO: 35963 - DNA, 20 bp, Artificial Sequence
  Synthetic
cagcactgcttcttggtgtt

SEQ ID NO: 35964 - DNA, 20 bp, Artificial Sequence
  Synthetic
tcacacacagcactgcttct

SEQ ID NO: 35965 - DNA, 20 bp, Artificial Sequence
  Synthetic
ctgctcccctccccagatac

SEQ ID NO: 35966 - DNA, 20 bp, Artificial Sequence
  Synthetic
tttgtcacacttccggtatc

SEQ ID NO: 35967 - DNA, 20 bp, Artificial Sequence
  Synthetic
cctctattttgtcacacttc

SEQ ID NO: 35968 - DNA, 20 bp, Artificial Sequence
  Synthetic
tgcaaattctgccacgtctg

SEQ ID NO: 35969 - DNA, 20 bp, Artificial Sequence
  Synthetic
tgccacgtctgtggacgcaa

SEQ ID NO: 35970 - DNA, 20 bp, Artificial Sequence
  Synthetic
gacctttgcgtccacagacg

SEQ ID NO: 35971 - DNA, 20 bp, Artificial Sequence
  Synthetic
gtctgtggacgcaaaggtcg

SEQ ID NO: 35972 - DNA, 20 bp, Artificial Sequence
  Synthetic
acgcaaaggtcgtggatcca

SEQ ID NO: 35973 - DNA, 20 bp, Artificial Sequence
  Synthetic
ccacatccaacagcacctcc

SEQ ID NO: 35974 - DNA, 20 bp, Artificial Sequence
  Synthetic
ggcagcgctcgcactccagg

SEQ ID NO: 35975 - DNA, 20 bp, Artificial Sequence
  Synthetic
ggcggcagcgctcgcactcc

SEQ ID NO: 35976 - DNA, 20 bp, Artificial Sequence
  Synthetic
ctgccgccatgcataccacc

SEQ ID NO: 35977 - DNA, 20 bp, Artificial Sequence
  Synthetic
aggccgggtggtatgcatgg

SEQ ID NO: 35978 - DNA, 20 bp, Artificial Sequence
  Synthetic
gacaggccgggtggtatgca

SEQ ID NO: 35979 - DNA, 20 bp, Artificial Sequence
  Synthetic
tgcataccacccggcctgtc

SEQ ID NO: 35980 - DNA, 20 bp, Artificial Sequence
  Synthetic
gcataccacccggcctgtct

SEQ ID NO: 35981 - DNA, 20 bp, Artificial Sequence
  Synthetic
cataccacccggcctgtctg

SEQ ID NO: 35982 - DNA, 20 bp, Artificial Sequence
  Synthetic
tgggccccagacaggccggg

SEQ ID NO: 35983 - DNA, 20 bp, Artificial Sequence
  Synthetic
agctgggccccagacaggcc

SEQ ID NO: 35984 - DNA, 20 bp, Artificial Sequence
  Synthetic
tagctgggccccagacaggc

SEQ ID NO: 35985 - DNA, 20 bp, Artificial Sequence
  Synthetic
tggatagctgggccccagac

SEQ ID NO: 35986 - DNA, 20 bp, Artificial Sequence
  Synthetic
tggggcccagctatccaacc

SEQ ID NO: 35987 - DNA, 20 bp, Artificial Sequence
  Synthetic
ggggcccagctatccaaccc

SEQ ID NO: 35988 - DNA, 20 bp, Artificial Sequence
  Synthetic
gtggcccgggttggatagct

SEQ ID NO: 35989 - DNA, 20 bp, Artificial Sequence
  Synthetic
cgtggcccgggttggatagc

SEQ ID NO: 35990 - DNA, 20 bp, Artificial Sequence
  Synthetic
cgtttgcgcgtggcccgggt

SEQ ID NO: 35991 - DNA, 20 bp, Artificial Sequence
  Synthetic
caacccgggccacgcgcaaa

SEQ ID NO: 35992 - DNA, 20 bp, Artificial Sequence
  Synthetic
gcgccgtttgcgcgtggccc

SEQ ID NO: 35993 - DNA, 20 bp, Artificial Sequence
  Synthetic
ggcgccgtttgcgcgtggcc

SEQ ID NO: 35994 - DNA, 20 bp, Artificial Sequence
  Synthetic
ccagtggcgccgtttgcgcg

SEQ ID NO: 35995 - DNA, 20 bp, Artificial Sequence
  Synthetic
ccacgcgcaaacggcgccac

SEQ ID NO: 35996 - DNA, 20 bp, Artificial Sequence
  Synthetic
cacgcgcaaacggcgccact

SEQ ID NO: 35997 - DNA, 20 bp, Artificial Sequence
  Synthetic
gaacctcatctctcacccag

SEQ ID NO: 35998 - DNA, 20 bp, Artificial Sequence
  Synthetic
gcacacaggctgaacagatc

SEQ ID NO: 35999 - DNA, 20 bp, Artificial Sequence
  Synthetic
acagctcttacagcgcacac

SEQ ID NO: 36000 - DNA, 20 bp, Artificial Sequence
  Synthetic
catagcagcgtgtacagatc

SEQ ID NO: 36001 - DNA, 20 bp, Artificial Sequence
  Synthetic
tcatagcagcgtgtacagat

SEQ ID NO: 36002 - DNA, 20 bp, Artificial Sequence
  Synthetic
agtgcgcacagtgcgatcac

SEQ ID NO: 36003 - DNA, 20 bp, Artificial Sequence
  Synthetic
gtgcgcacagtgcgatcact

SEQ ID NO: 36004 - DNA, 20 bp, Artificial Sequence
  Synthetic
ctgggtgcatgccaagtgcg

SEQ ID NO: 36005 - DNA, 20 bp, Artificial Sequence
  Synthetic
tgggtgcatgccaagtgcga

SEQ ID NO: 36006 - DNA, 20 bp, Artificial Sequence
  Synthetic
gggtgcatgccaagtgcgag

SEQ ID NO: 36007 - DNA, 20 bp, Artificial Sequence
  Synthetic
gccaagtgcgaggggctctc

SEQ ID NO: 36008 - DNA, 20 bp, Artificial Sequence
  Synthetic
acctgagagcccctcgcact

SEQ ID NO: 36009 - DNA, 20 bp, Artificial Sequence
  Synthetic
gaagactacgagatcctttc

SEQ ID NO: 36010 - DNA, 20 bp, Artificial Sequence
  Synthetic
ccgagtctggcagtcctgaa

SEQ ID NO: 36011 - DNA, 20 bp, Artificial Sequence
  Synthetic
cctttcaggactgccagact

SEQ ID NO: 36012 - DNA, 20 bp, Artificial Sequence
  Synthetic
caggtgtacagcaccgagtc

SEQ ID NO: 36013 - DNA, 20 bp, Artificial Sequence
  Synthetic
gactcggtgctgtacacctg

SEQ ID NO: 36014 - DNA, 20 bp, Artificial Sequence
  Synthetic
tacacctgcggaccgtgtgc

SEQ ID NO: 36015 - DNA, 20 bp, Artificial Sequence
  Synthetic
acacctgcggaccgtgtgct

SEQ ID NO: 36016 - DNA, 20 bp, Artificial Sequence
  Synthetic
cacctgcggaccgtgtgctg

SEQ ID NO: 36017 - DNA, 20 bp, Artificial Sequence
  Synthetic
tgccccagcacacggtccgc

SEQ ID NO: 36018 - DNA, 20 bp, Artificial Sequence
  Synthetic
ggctgcgctgccccagcaca

SEQ ID NO: 36019 - DNA, 20 bp, Artificial Sequence
  Synthetic
acacacttttttttaggggc

SEQ ID NO: 36020 - DNA, 20 bp, Artificial Sequence
  Synthetic
cacacttttttttaggggct

SEQ ID NO: 36021 - DNA, 20 bp, Artificial Sequence
  Synthetic
caatgtctcgagcagcatac

SEQ ID NO: 36022 - DNA, 20 bp, Artificial Sequence
  Synthetic
agacattgagaaacacacca

SEQ ID NO: 36023 - DNA, 20 bp, Artificial Sequence
  Synthetic
accatggtcattgagtacat

SEQ ID NO: 36024 - DNA, 20 bp, Artificial Sequence
  Synthetic
cccgatgtactcaatgacca

SEQ ID NO: 36025 - DNA, 20 bp, Artificial Sequence
  Synthetic
ccatggtcattgagtacatc

SEQ ID NO: 36026 - DNA, 20 bp, Artificial Sequence
  Synthetic
ttcgaaacgaagtagccaac

SEQ ID NO: 36027 - DNA, 20 bp, Artificial Sequence
  Synthetic
ataaagcttctctttcctgt

SEQ ID NO: 36028 - DNA, 20 bp, Artificial Sequence
  Synthetic
agagaagctttatgagtctc

SEQ ID NO: 36029 - DNA, 20 bp, Artificial Sequence
  Synthetic
aagctttatgagtctcaggt

SEQ ID NO: 36030 - DNA, 20 bp, Artificial Sequence
  Synthetic
tgacttttccctcagaaccg

SEQ ID NO: 36031 - DNA, 20 bp, Artificial Sequence
  Synthetic
tgcggaacatgtacacacca

SEQ ID NO: 36032 - DNA, 20 bp, Artificial Sequence
  Synthetic
tggtgtgtacatgttccgca

SEQ ID NO: 36033 - DNA, 20 bp, Artificial Sequence
  Synthetic
tcacatggtcgttatccatg

SEQ ID NO: 36034 - DNA, 20 bp, Artificial Sequence
  Synthetic
tgagcgtcgcgtcaatcaca

SEQ ID NO: 36035 - DNA, 20 bp, Artificial Sequence
  Synthetic
gtgattgacgcgacgctcac

SEQ ID NO: 36036 - DNA, 20 bp, Artificial Sequence
  Synthetic
attgacgcgacgctcacagg

SEQ ID NO: 36037 - DNA, 20 bp, Artificial Sequence
  Synthetic
ttgacgcgacgctcacagga

SEQ ID NO: 36038 - DNA, 20 bp, Artificial Sequence
  Synthetic
cgctcacaggagggcccgca

SEQ ID NO: 36039 - DNA, 20 bp, Artificial Sequence
  Synthetic
tcctcgctgtctcaccttgc

SEQ ID NO: 36040 - DNA, 20 bp, Artificial Sequence
  Synthetic
ttcctcgctgtctcaccttg

SEQ ID NO: 36041 - DNA, 20 bp, Artificial Sequence
  Synthetic
cacaattaggtgcacacgaa

SEQ ID NO: 36042 - DNA, 20 bp, Artificial Sequence
  Synthetic
ttcgtgtgcacctaattgtg

SEQ ID NO: 36043 - DNA, 20 bp, Artificial Sequence
  Synthetic
acctaattgtgtggctgaag

SEQ ID NO: 36044 - DNA, 20 bp, Artificial Sequence
  Synthetic
accacttcagccacacaatt

SEQ ID NO: 36045 - DNA, 20 bp, Artificial Sequence
  Synthetic
gaagtggtgacttttgagag

SEQ ID NO: 36046 - DNA, 20 bp, Artificial Sequence
  Synthetic
aaattatcatcagctccagt

SEQ ID NO: 36047 - DNA, 20 bp, Artificial Sequence
  Synthetic
tccagtcggagaatccagaa

SEQ ID NO: 36048 - DNA, 20 bp, Artificial Sequence
  Synthetic
tcctttctggattctccgac

SEQ ID NO: 36049 - DNA, 20 bp, Artificial Sequence
  Synthetic
gagaatccagaaaggagaag

SEQ ID NO: 36050 - DNA, 20 bp, Artificial Sequence
  Synthetic
ctcttacctcttctcctttc

SEQ ID NO: 36051 - DNA, 20 bp, Artificial Sequence
  Synthetic
tgaaaacttacttgcagttc

SEQ ID NO: 36052 - DNA, 20 bp, Artificial Sequence
  Synthetic
tatcttattttttagacaat

SEQ ID NO: 36053 - DNA, 20 bp, Artificial Sequence
  Synthetic
atcttattttttagacaatc

SEQ ID NO: 36054 - DNA, 20 bp, Artificial Sequence
  Synthetic
gtgtgtgatacgtgtgacaa

SEQ ID NO: 36055 - DNA, 20 bp, Artificial Sequence
  Synthetic
tgtgtgatacgtgtgacaaa

SEQ ID NO: 36056 - DNA, 20 bp, Artificial Sequence
  Synthetic
gttggtactgatttcataac

SEQ ID NO: 36057 - DNA, 20 bp, Artificial Sequence
  Synthetic
atgaaatcagtaccaaccaa

SEQ ID NO: 36058 - DNA, 20 bp, Artificial Sequence
  Synthetic
aatcagtaccaaccaatggc

SEQ ID NO: 36059 - DNA, 20 bp, Artificial Sequence
  Synthetic
ttgcatttccagccattggt

SEQ ID NO: 36060 - DNA, 20 bp, Artificial Sequence
  Synthetic
tactttgcatttccagccat

SEQ ID NO: 36061 - DNA, 20 bp, Artificial Sequence
  Synthetic
tcttgagtgcactgtgtgtg

SEQ ID NO: 36062 - DNA, 20 bp, Artificial Sequence
  Synthetic
tgcactgtgtgtgaggcctg

SEQ ID NO: 36063 - DNA, 20 bp, Artificial Sequence
  Synthetic
gcactgtgtgtgaggcctgt

SEQ ID NO: 36064 - DNA, 20 bp, Artificial Sequence
  Synthetic
tgtgtgtgaggcctgtggga

SEQ ID NO: 36065 - DNA, 20 bp, Artificial Sequence
  Synthetic
tgggtcagttgccttcccac

SEQ ID NO: 36066 - DNA, 20 bp, Artificial Sequence
  Synthetic
tgtgggaaggcaactgaccc

SEQ ID NO: 36067 - DNA, 20 bp, Artificial Sequence
  Synthetic
cacacagcaggagtcttcct

SEQ ID NO: 36068 - DNA, 20 bp, Artificial Sequence
  Synthetic
tcacacagcaggagtcttcc

SEQ ID NO: 36069 - DNA, 20 bp, Artificial Sequence
  Synthetic
tgtcacagtcatcacacagc

SEQ ID NO: 36070 - DNA, 20 bp, Artificial Sequence
  Synthetic
caatggagggtctaggcagt

SEQ ID NO: 36071 - DNA, 20 bp, Artificial Sequence
  Synthetic
ctgtctgcaatggagggtct

SEQ ID NO: 36072 - DNA, 20 bp, Artificial Sequence
  Synthetic
tgggaactgtctgcaatgga

SEQ ID NO: 36073 - DNA, 20 bp, Artificial Sequence
  Synthetic
ttgggaactgtctgcaatgg

SEQ ID NO: 36074 - DNA, 20 bp, Artificial Sequence
  Synthetic
cctttgggaactgtctgcaa

SEQ ID NO: 36075 - DNA, 20 bp, Artificial Sequence
  Synthetic
ccattgcagacagttcccaa

SEQ ID NO: 36076 - DNA, 20 bp, Artificial Sequence
  Synthetic
ttgcagacagttcccaaagg

SEQ ID NO: 36077 - DNA, 20 bp, Artificial Sequence
  Synthetic
agacagttcccaaaggaggc

SEQ ID NO: 36078 - DNA, 20 bp, Artificial Sequence
  Synthetic
ttgcacttccagcctccttt

SEQ ID NO: 36079 - DNA, 20 bp, Artificial Sequence
  Synthetic
tttgcacttccagcctcctt

SEQ ID NO: 36080 - DNA, 20 bp, Artificial Sequence
  Synthetic
aaggaggctggaagtgcaaa

SEQ ID NO: 36081 - DNA, 20 bp, Artificial Sequence
  Synthetic
atttggatttcaggtgtgtt

SEQ ID NO: 36082 - DNA, 20 bp, Artificial Sequence
  Synthetic
tcgctcccgtatccagggcc

SEQ ID NO: 36083 - DNA, 20 bp, Artificial Sequence
  Synthetic
cgctcccgtatccagggcct

SEQ ID NO: 36084 - DNA, 20 bp, Artificial Sequence
  Synthetic
gctcccgtatccagggcctg

SEQ ID NO: 36085 - DNA, 20 bp, Artificial Sequence
  Synthetic
ctgcatagagccccaggccc

SEQ ID NO: 36086 - DNA, 20 bp, Artificial Sequence
  Synthetic
ccttggctgcatagagcccc

SEQ ID NO: 36087 - DNA, 20 bp, Artificial Sequence
  Synthetic
cctggggctctatgcagcca

SEQ ID NO: 36088 - DNA, 20 bp, Artificial Sequence
  Synthetic
tgtgtgcttttctaggtcct

SEQ ID NO: 36089 - DNA, 20 bp, Artificial Sequence
  Synthetic
ggacctagaaaagcacacaa

SEQ ID NO: 36090 - DNA, 20 bp, Artificial Sequence
  Synthetic
taaccattgtgtgcttttct

SEQ ID NO: 36091 - DNA, 20 bp, Artificial Sequence
  Synthetic
acaatggttatcgagtacat

SEQ ID NO: 36092 - DNA, 20 bp, Artificial Sequence
  Synthetic
agtacattggcaccatcatt

SEQ ID NO: 36093 - DNA, 20 bp, Artificial Sequence
  Synthetic
tggcaccatcattcggaacg

SEQ ID NO: 36094 - DNA, 20 bp, Artificial Sequence
  Synthetic
caccatcattcggaacgagg

SEQ ID NO: 36095 - DNA, 20 bp, Artificial Sequence
  Synthetic
ggccacctcgttccgaatga

SEQ ID NO: 36096 - DNA, 20 bp, Artificial Sequence
  Synthetic
ttcggaacgaggtggccaac

SEQ ID NO: 36097 - DNA, 20 bp, Artificial Sequence
  Synthetic
ggaacgaggtggccaaccgg

SEQ ID NO: 36098 - DNA, 20 bp, Artificial Sequence
  Synthetic
gaacgaggtggccaaccggc

SEQ ID NO: 36099 - DNA, 20 bp, Artificial Sequence
  Synthetic
gtagattttctcccgccggt

SEQ ID NO: 36100 - DNA, 20 bp, Artificial Sequence
  Synthetic
cttcgtagattttctcccgc

SEQ ID NO: 36101 - DNA, 20 bp, Artificial Sequence
  Synthetic
ggagaaaatctacgaagagc

SEQ ID NO: 36102 - DNA, 20 bp, Artificial Sequence
  Synthetic
cctctgcctttctagaatcg

SEQ ID NO: 36103 - DNA, 20 bp, Artificial Sequence
  Synthetic
tcacatgttcattgtttatt

SEQ ID NO: 36104 - DNA, 20 bp, Artificial Sequence
  Synthetic
gtgattgatgctacgttgac

SEQ ID NO: 36105 - DNA, 20 bp, Artificial Sequence
  Synthetic
attgatgctacgttgaccgg

SEQ ID NO: 36106 - DNA, 20 bp, Artificial Sequence
  Synthetic
cgttgaccggcggccctgcc

SEQ ID NO: 36107 - DNA, 20 bp, Artificial Sequence
  Synthetic
ctctcacctggcagggccgc

SEQ ID NO: 36108 - DNA, 20 bp, Artificial Sequence
  Synthetic
tcgtcatctctcacctggca

SEQ ID NO: 36109 - DNA, 20 bp, Artificial Sequence
  Synthetic
ctcgtcatctctcacctggc

SEQ ID NO: 36110 - DNA, 20 bp, Artificial Sequence
  Synthetic
acaggaatggttaatgtacc

SEQ ID NO: 36111 - DNA, 20 bp, Artificial Sequence
  Synthetic
cacagttaggggcacaggaa

SEQ ID NO: 36112 - DNA, 20 bp, Artificial Sequence
  Synthetic
ttcctgtgcccctaactgtg

SEQ ID NO: 36113 - DNA, 20 bp, Artificial Sequence
  Synthetic
ggccacacagttaggggcac

SEQ ID NO: 36114 - DNA, 20 bp, Artificial Sequence
  Synthetic
gacttcggccacacagttag

SEQ ID NO: 36115 - DNA, 20 bp, Artificial Sequence
  Synthetic
cgacttcggccacacagtta

SEQ ID NO: 36116 - DNA, 20 bp, Artificial Sequence
  Synthetic
acgacttcggccacacagtt

SEQ ID NO: 36117 - DNA, 20 bp, Artificial Sequence
  Synthetic
tttgtcaaatgtcacgactt

SEQ ID NO: 36118 - DNA, 20 bp, Artificial Sequence
  Synthetic
agtcgtgacatttgacaaag

SEQ ID NO: 36119 - DNA, 20 bp, Artificial Sequence
  Synthetic
aaatcatcatcatctccagc

SEQ ID NO: 36120 - DNA, 20 bp, Artificial Sequence
  Synthetic
tccagccggcgaatccccaa

SEQ ID NO: 36121 - DNA, 20 bp, Artificial Sequence
  Synthetic
tcctttggggattcgccggc

SEQ ID NO: 36122 - DNA, 20 bp, Artificial Sequence
  Synthetic
cctctcctttggggattcgc

SEQ ID NO: 36123 - DNA, 20 bp, Artificial Sequence
  Synthetic
ccggcgaatccccaaaggag

SEQ ID NO: 36124 - DNA, 20 bp, Artificial Sequence
  Synthetic
gcgaatccccaaaggagagg

SEQ ID NO: 36125 - DNA, 20 bp, Artificial Sequence
  Synthetic
ctctcacctcctctcctttg

SEQ ID NO: 36126 - DNA, 20 bp, Artificial Sequence
  Synthetic
cctctcacctcctctccttt

SEQ ID NO: 36127 - DNA, 20 bp, Artificial Sequence
  Synthetic
tcctctcacctcctctcctt

SEQ ID NO: 36128 - DNA, 20 bp, Artificial Sequence
  Synthetic
aaaatcaaactgatagtcat

SEQ ID NO: 36129 - DNA, 20 bp, Artificial Sequence
  Synthetic
tgtggagtgtattgtgtgtg

SEQ ID NO: 36130 - DNA, 20 bp, Artificial Sequence
  Synthetic
tgtattgtgtgtgaggtgtg

SEQ ID NO: 36131 - DNA, 20 bp, Artificial Sequence
  Synthetic
tgtgtgtgaggtgtgtggcc

SEQ ID NO: 36132 - DNA, 20 bp, Artificial Sequence
  Synthetic
ggcgtgaggggtcggaggcc

SEQ ID NO: 36133 - DNA, 20 bp, Artificial Sequence
  Synthetic
cagcaggcgtgaggggtcgg

SEQ ID NO: 36134 - DNA, 20 bp, Artificial Sequence
  Synthetic
gagcagcaggcgtgaggggt

SEQ ID NO: 36135 - DNA, 20 bp, Artificial Sequence
  Synthetic
cacagagcagcaggcgtgag

SEQ ID NO: 36136 - DNA, 20 bp, Artificial Sequence
  Synthetic
tcacagagcagcaggcgtga

SEQ ID NO: 36137 - DNA, 20 bp, Artificial Sequence
  Synthetic
atcacagagcagcaggcgtg

SEQ ID NO: 36138 - DNA, 20 bp, Artificial Sequence
  Synthetic
cacagtcatcacagagcagc

SEQ ID NO: 36139 - DNA, 20 bp, Artificial Sequence
  Synthetic
tagctaccacacatactgcc

SEQ ID NO: 36140 - DNA, 20 bp, Artificial Sequence
  Synthetic
gggggtccaggcagtatgtg

SEQ ID NO: 36141 - DNA, 20 bp, Artificial Sequence
  Synthetic
cggtgagcagtggggggtcc

SEQ ID NO: 36142 - DNA, 20 bp, Artificial Sequence
  Synthetic
tggggacggtgagcagtggg

SEQ ID NO: 36143 - DNA, 20 bp, Artificial Sequence
  Synthetic
ttggggacggtgagcagtgg

SEQ ID NO: 36144 - DNA, 20 bp, Artificial Sequence
  Synthetic
cttggggacggtgagcagtg

SEQ ID NO: 36145 - DNA, 20 bp, Artificial Sequence
  Synthetic
ccttggggacggtgagcagt

SEQ ID NO: 36146 - DNA, 20 bp, Artificial Sequence
  Synthetic
cccactgctcaccgtcccca

SEQ ID NO: 36147 - DNA, 20 bp, Artificial Sequence
  Synthetic
cccttggggacggtgagcag

SEQ ID NO: 36148 - DNA, 20 bp, Artificial Sequence
  Synthetic
ccactgctcaccgtccccaa

SEQ ID NO: 36149 - DNA, 20 bp, Artificial Sequence
  Synthetic
ctgctcaccgtccccaaggg

SEQ ID NO: 36150 - DNA, 20 bp, Artificial Sequence
  Synthetic
tcaccgtccccaagggcggc

SEQ ID NO: 36151 - DNA, 20 bp, Artificial Sequence
  Synthetic
cttccagccgcccttgggga

SEQ ID NO: 36152 - DNA, 20 bp, Artificial Sequence
  Synthetic
tgcacttccagccgcccttg

SEQ ID NO: 36153 - DNA, 20 bp, Artificial Sequence
  Synthetic
ttgcacttccagccgccctt

SEQ ID NO: 36154 - DNA, 20 bp, Artificial Sequence
  Synthetic
cttgcacttccagccgccct

SEQ ID NO: 36155 - DNA, 20 bp, Artificial Sequence
  Synthetic
agggcggctggaagtgcaag

SEQ ID NO: 36156 - DNA, 20 bp, Artificial Sequence
  Synthetic
gcaaagtgtgccaagcctgc

SEQ ID NO: 36157 - DNA, 20 bp, Artificial Sequence
  Synthetic
agtgtgccaagcctgcaggt

SEQ ID NO: 36158 - DNA, 20 bp, Artificial Sequence
  Synthetic
tccattcctacctgcaggct

SEQ ID NO: 36159 - DNA, 20 bp, Artificial Sequence
  Synthetic
gcccttccattcctacctgc

SEQ ID NO: 36160 - DNA, 20 bp, Artificial Sequence
  Synthetic
atgtgcacctgcaggaaacc

SEQ ID NO: 36161 - DNA, 20 bp, Artificial Sequence
  Synthetic
tgtgcacctgcaggaaacct

SEQ ID NO: 36162 - DNA, 20 bp, Artificial Sequence
  Synthetic
aacatcttagagtcattccc

SEQ ID NO: 36163 - DNA, 20 bp, Artificial Sequence
  Synthetic
tgggaatgactctaagatgt

SEQ ID NO: 36164 - DNA, 20 bp, Artificial Sequence
  Synthetic
gtttgtgagacgtgtgacaa

SEQ ID NO: 36165 - DNA, 20 bp, Artificial Sequence
  Synthetic
gtggttttaggcagaaagta

SEQ ID NO: 36166 - DNA, 20 bp, Artificial Sequence
  Synthetic
tttctgcctaaaaccaccca

SEQ ID NO: 36167 - DNA, 20 bp, Artificial Sequence
  Synthetic
ctgcctaaaaccacccatgg

SEQ ID NO: 36168 - DNA, 20 bp, Artificial Sequence
  Synthetic
gttcctccatgggtggtttt

SEQ ID NO: 36169 - DNA, 20 bp, Artificial Sequence
  Synthetic
gcaggcagttcctccatggg

SEQ ID NO: 36170 - DNA, 20 bp, Artificial Sequence
  Synthetic
tgagcaggcagttcctccat

SEQ ID NO: 36171 - DNA, 20 bp, Artificial Sequence
  Synthetic
gtgagcaggcagttcctcca

SEQ ID NO: 36172 - DNA, 20 bp, Artificial Sequence
  Synthetic
aggaactgcctgctcactct

SEQ ID NO: 36173 - DNA, 20 bp, Artificial Sequence
  Synthetic
ttgcacttccaagagtgagc

SEQ ID NO: 36174 - DNA, 20 bp, Artificial Sequence
  Synthetic
tgctcactcttggaagtgca

SEQ ID NO: 36175 - DNA, 20 bp, Artificial Sequence
  Synthetic
ctcccttcccttaggcgtgc

SEQ ID NO: 36176 - DNA, 20 bp, Artificial Sequence
  Synthetic
tcccttcccttaggcgtgcc

SEQ ID NO: 36177 - DNA, 20 bp, Artificial Sequence
  Synthetic
ccccacaggcccggcacacc

SEQ ID NO: 36178 - DNA, 20 bp, Artificial Sequence
  Synthetic
gtttccccaggacatgtgtg

SEQ ID NO: 36179 - DNA, 20 bp, Artificial Sequence
  Synthetic
caggacatgtgtgtggtatg

SEQ ID NO: 36180 - DNA, 20 bp, Artificial Sequence
  Synthetic
tgtgtggtatgtggcagctt

SEQ ID NO: 36181 - DNA, 20 bp, Artificial Sequence
  Synthetic
tggtatgtggcagctttggc

SEQ ID NO: 36182 - DNA, 20 bp, Artificial Sequence
  Synthetic
ggtatgtggcagctttggcc

SEQ ID NO: 36183 - DNA, 20 bp, Artificial Sequence
  Synthetic
gtatgtggcagctttggccg

SEQ ID NO: 36184 - DNA, 20 bp, Artificial Sequence
  Synthetic
tatgtggcagctttggccgg

SEQ ID NO: 36185 - DNA, 20 bp, Artificial Sequence
  Synthetic
atgtggcagctttggccggg

SEQ ID NO: 36186 - DNA, 20 bp, Artificial Sequence
  Synthetic
cagctttggccggggggcag

SEQ ID NO: 36187 - DNA, 20 bp, Artificial Sequence
  Synthetic
agctttggccggggggcaga

SEQ ID NO: 36188 - DNA, 20 bp, Artificial Sequence
  Synthetic
ggaggtggccctctgccccc

SEQ ID NO: 36189 - DNA, 20 bp, Artificial Sequence
  Synthetic
actgcgaacaggcaaggagg

SEQ ID NO: 36190 - DNA, 20 bp, Artificial Sequence
  Synthetic
agcactgcgaacaggcaagg

SEQ ID NO: 36191 - DNA, 20 bp, Artificial Sequence
  Synthetic
gagagcactgcgaacaggca

SEQ ID NO: 36192 - DNA, 20 bp, Artificial Sequence
  Synthetic
gcactgagagcactgcgaac

SEQ ID NO: 36193 - DNA, 20 bp, Artificial Sequence
  Synthetic
ccttgctgttgacacagtaa

SEQ ID NO: 36194 - DNA, 20 bp, Artificial Sequence
  Synthetic
cccttactgtgtcaacagca

SEQ ID NO: 36195 - DNA, 20 bp, Artificial Sequence
  Synthetic
accttgctgttgacacagta

SEQ ID NO: 36196 - DNA, 20 bp, Artificial Sequence
  Synthetic
tcttctgccccagatcacca

SEQ ID NO: 36197 - DNA, 20 bp, Artificial Sequence
  Synthetic
gcagcatcaccttggtgatc

SEQ ID NO: 36198 - DNA, 20 bp, Artificial Sequence
  Synthetic
caccaaggtgatgctgctca

SEQ ID NO: 36199 - DNA, 20 bp, Artificial Sequence
  Synthetic
accaaggtgatgctgctcaa

SEQ ID NO: 36200 - DNA, 20 bp, Artificial Sequence
  Synthetic
gcccttgagcagcatcacct

SEQ ID NO: 36201 - DNA, 20 bp, Artificial Sequence
  Synthetic
aggtgatgctgctcaagggc

SEQ ID NO: 36202 - DNA, 20 bp, Artificial Sequence
  Synthetic
gctcaagggctggcgttgtg

SEQ ID NO: 36203 - DNA, 20 bp, Artificial Sequence
  Synthetic
tcaatgataagtgcatcagg

SEQ ID NO: 36204 - DNA, 20 bp, Artificial Sequence
  Synthetic
tattcaatgataagtgcatc

SEQ ID NO: 36205 - DNA, 20 bp, Artificial Sequence
  Synthetic
gcacttatcattgaatacag

SEQ ID NO: 36206 - DNA, 20 bp, Artificial Sequence
  Synthetic
cacttatcattgaatacaga

SEQ ID NO: 36207 - DNA, 20 bp, Artificial Sequence
  Synthetic
agagaacagtttgaagcaaa

SEQ ID NO: 36208 - DNA, 20 bp, Artificial Sequence
  Synthetic
gagaacagtttgaagcaaat

SEQ ID NO: 36209 - DNA, 20 bp, Artificial Sequence
  Synthetic
caaatgggtatttctttaaa

SEQ ID NO: 36210 - DNA, 20 bp, Artificial Sequence
  Synthetic
tagaataacacaaaagggta

SEQ ID NO: 36211 - DNA, 20 bp, Artificial Sequence
  Synthetic
tagagtagaataacacaaaa

SEQ ID NO: 36212 - DNA, 20 bp, Artificial Sequence
  Synthetic
ttagagtagaataacacaaa

SEQ ID NO: 36213 - DNA, 20 bp, Artificial Sequence
  Synthetic
ttattctactctaaatttca

SEQ ID NO: 36214 - DNA, 20 bp, Artificial Sequence
  Synthetic
tattctactctaaatttcat

SEQ ID NO: 36215 - DNA, 20 bp, Artificial Sequence
  Synthetic
tagaaatgtgtgttgatgca

SEQ ID NO: 36216 - DNA, 20 bp, Artificial Sequence
  Synthetic
tgtgttgatgcaaggacttt

SEQ ID NO: 36217 - DNA, 20 bp, Artificial Sequence
  Synthetic
gtgttgatgcaaggactttt

SEQ ID NO: 36218 - DNA, 20 bp, Artificial Sequence
  Synthetic
tgcaaggacttttgggaatg

SEQ ID NO: 36219 - DNA, 20 bp, Artificial Sequence
  Synthetic
ggaatgaggctcgattcatc

SEQ ID NO: 36220 - DNA, 20 bp, Artificial Sequence
  Synthetic
atgaggctcgattcatcagg

SEQ ID NO: 36221 - DNA, 20 bp, Artificial Sequence
  Synthetic
gtcttgtacacccaatgcag

SEQ ID NO: 36222 - DNA, 20 bp, Artificial Sequence
  Synthetic
tataagcttacctctgcatt

SEQ ID NO: 36223 - DNA, 20 bp, Artificial Sequence
  Synthetic
ctataagcttacctctgcat

SEQ ID NO: 36224 - DNA, 20 bp, Artificial Sequence
  Synthetic
gtgaggcatgaaattcaaga

SEQ ID NO: 36225 - DNA, 20 bp, Artificial Sequence
  Synthetic
agaataaatataaagatgta

SEQ ID NO: 36226 - DNA, 20 bp, Artificial Sequence
  Synthetic
ttctatacacagtattccaa

SEQ ID NO: 36227 - DNA, 20 bp, Artificial Sequence
  Synthetic
tctatacacagtattccaaa

SEQ ID NO: 36228 - DNA, 20 bp, Artificial Sequence
  Synthetic
atagtaatttcagttccctt

SEQ ID NO: 36229 - DNA, 20 bp, Artificial Sequence
  Synthetic
gatgtaaccaggtgcatatg

SEQ ID NO: 36230 - DNA, 20 bp, Artificial Sequence
  Synthetic
tgtaaaaccacatatgcacc

SEQ ID NO: 36231 - DNA, 20 bp, Artificial Sequence
  Synthetic
tgtggttttacacatgatga

SEQ ID NO: 36232 - DNA, 20 bp, Artificial Sequence
  Synthetic
tgatctgttgtgacaaatgc

SEQ ID NO: 36233 - DNA, 20 bp, Artificial Sequence
  Synthetic
cttttttttttttaagcgtt

SEQ ID NO: 36234 - DNA, 20 bp, Artificial Sequence
  Synthetic
ttggcaacatattgactgca

SEQ ID NO: 36235 - DNA, 20 bp, Artificial Sequence
  Synthetic
tggcaacatattgactgcat

SEQ ID NO: 36236 - DNA, 20 bp, Artificial Sequence
  Synthetic
ggcaacatattgactgcatg

SEQ ID NO: 36237 - DNA, 20 bp, Artificial Sequence
  Synthetic
ttgactgcatggggattgat

SEQ ID NO: 36238 - DNA, 20 bp, Artificial Sequence
  Synthetic
cgttcacatagatatgtatc

SEQ ID NO: 36239 - DNA, 20 bp, Artificial Sequence
  Synthetic
tatgtgaacgttgtcagcct

SEQ ID NO: 36240 - DNA, 20 bp, Artificial Sequence
  Synthetic
ccgggaacagagaatgttta

SEQ ID NO: 36241 - DNA, 20 bp, Artificial Sequence
  Synthetic
ctaccattcctggcagcgtg

SEQ ID NO: 36242 - DNA, 20 bp, Artificial Sequence
  Synthetic
taccattcctggcagcgtgt

SEQ ID NO: 36243 - DNA, 20 bp, Artificial Sequence
  Synthetic
tcctggcagcgtgtgggctg

SEQ ID NO: 36244 - DNA, 20 bp, Artificial Sequence
  Synthetic
cctggcagcgtgtgggctgt

SEQ ID NO: 36245 - DNA, 20 bp, Artificial Sequence
  Synthetic
ctggcagcgtgtgggctgtg

SEQ ID NO: 36246 - DNA, 20 bp, Artificial Sequence
  Synthetic
tggggagtgtgcagcctgcc

SEQ ID NO: 36247 - DNA, 20 bp, Artificial Sequence
  Synthetic
acagtcttctgttacctggc

SEQ ID NO: 36248 - DNA, 20 bp, Artificial Sequence
  Synthetic
tgccaggtaacagaagactg

SEQ ID NO: 36249 - DNA, 20 bp, Artificial Sequence
  Synthetic
gccaggtaacagaagactgt

SEQ ID NO: 36250 - DNA, 20 bp, Artificial Sequence
  Synthetic
ccccacagtcttctgttacc

SEQ ID NO: 36251 - DNA, 20 bp, Artificial Sequence
  Synthetic
ccaggtaacagaagactgtg

SEQ ID NO: 36252 - DNA, 20 bp, Artificial Sequence
  Synthetic
ctgcaggaggcaggtggagc

SEQ ID NO: 36253 - DNA, 20 bp, Artificial Sequence
  Synthetic
gggcagctgcaggaggcagg

SEQ ID NO: 36254 - DNA, 20 bp, Artificial Sequence
  Synthetic
atggggcagctgcaggaggc

SEQ ID NO: 36255 - DNA, 20 bp, Artificial Sequence
  Synthetic
catcatggggcagctgcagg

SEQ ID NO: 36256 - DNA, 20 bp, Artificial Sequence
  Synthetic
ccacatcatggggcagctgc

SEQ ID NO: 36257 - DNA, 20 bp, Artificial Sequence
  Synthetic
cctgcagctgccccatgatg

SEQ ID NO: 36258 - DNA, 20 bp, Artificial Sequence
  Synthetic
gctgccccatgatgtggcat

SEQ ID NO: 36259 - DNA, 20 bp, Artificial Sequence
  Synthetic
ctgccccatgatgtggcatc

SEQ ID NO: 36260 - DNA, 20 bp, Artificial Sequence
  Synthetic
tgccccatgatgtggcatcg

SEQ ID NO: 36261 - DNA, 20 bp, Artificial Sequence
  Synthetic
agccccgatgccacatcatg

SEQ ID NO: 36262 - DNA, 20 bp, Artificial Sequence
  Synthetic
cagccccgatgccacatcat

SEQ ID NO: 36263 - DNA, 20 bp, Artificial Sequence
  Synthetic
acagccccgatgccacatca

SEQ ID NO: 36264 - DNA, 20 bp, Artificial Sequence
  Synthetic
ggctgttctgcaagtgtgaa

SEQ ID NO: 36265 - DNA, 20 bp, Artificial Sequence
  Synthetic
agcagccctacacgaaccgc

SEQ ID NO: 36266 - DNA, 20 bp, Artificial Sequence
  Synthetic
cgcacttgcggttctgccgg

SEQ ID NO: 36267 - DNA, 20 bp, Artificial Sequence
  Synthetic
cgccggcagaaccgcaagtg

SEQ ID NO: 36268 - DNA, 20 bp, Artificial Sequence
  Synthetic
gccggcagaaccgcaagtgc

SEQ ID NO: 36269 - DNA, 20 bp, Artificial Sequence
  Synthetic
ccccgcacttgcggttctgc

SEQ ID NO: 36270 - DNA, 20 bp, Artificial Sequence
  Synthetic
ccggcagaaccgcaagtgcg

SEQ ID NO: 36271 - DNA, 20 bp, Artificial Sequence
  Synthetic
ctgcacaggccccgcacttg

SEQ ID NO: 36272 - DNA, 20 bp, Artificial Sequence
  Synthetic
gggcctgtgcagcctgccta

SEQ ID NO: 36273 - DNA, 20 bp, Artificial Sequence
  Synthetic
ccgccgtaggcaggctgcac

SEQ ID NO: 36274 - DNA, 20 bp, Artificial Sequence
  Synthetic
cctgtgcagcctgcctacgg

SEQ ID NO: 36275 - DNA, 20 bp, Artificial Sequence
  Synthetic
tgcagcctgcctacggcgga

SEQ ID NO: 36276 - DNA, 20 bp, Artificial Sequence
  Synthetic
acagtccatccgccgtaggc

SEQ ID NO: 36277 - DNA, 20 bp, Artificial Sequence
  Synthetic
tgcctacggcggatggactg

SEQ ID NO: 36278 - DNA, 20 bp, Artificial Sequence
  Synthetic
ggccacagtccatccgccgt

SEQ ID NO: 36279 - DNA, 20 bp, Artificial Sequence
  Synthetic
tgtcgcagcagaagtcgcag

SEQ ID NO: 36280 - DNA, 20 bp, Artificial Sequence
  Synthetic
tgctgcgacaagcccaaatt

SEQ ID NO: 36281 - DNA, 20 bp, Artificial Sequence
  Synthetic
gctgcgacaagcccaaattc

SEQ ID NO: 36282 - DNA, 20 bp, Artificial Sequence
  Synthetic
ctgcgacaagcccaaattcg

SEQ ID NO: 36283 - DNA, 20 bp, Artificial Sequence
  Synthetic
tgcgacaagcccaaattcgg

SEQ ID NO: 36284 - DNA, 20 bp, Artificial Sequence
  Synthetic
tggttgctgcccccgaattt

SEQ ID NO: 36285 - DNA, 20 bp, Artificial Sequence
  Synthetic
ctggttgctgcccccgaatt

SEQ ID NO: 36286 - DNA, 20 bp, Artificial Sequence
  Synthetic
aacgacacttctggcgcttc

SEQ ID NO: 36287 - DNA, 20 bp, Artificial Sequence
  Synthetic
agaagcgccagaagtgtcgt

SEQ ID NO: 36288 - DNA, 20 bp, Artificial Sequence
  Synthetic
attggcgccaacgacacttc

SEQ ID NO: 36289 - DNA, 20 bp, Artificial Sequence
  Synthetic
ccatggcaaactgcaggcat

SEQ ID NO: 36290 - DNA, 20 bp, Artificial Sequence
  Synthetic
gctgcctccggattgtggaa

SEQ ID NO: 36291 - DNA, 20 bp, Artificial Sequence
  Synthetic
ctgcctccggattgtggaaa

SEQ ID NO: 36292 - DNA, 20 bp, Artificial Sequence
  Synthetic
gccccccgccaacagagccg

SEQ ID NO: 36293 - DNA, 20 bp, Artificial Sequence
  Synthetic
ccccccgccaacagagccga

SEQ ID NO: 36294 - DNA, 20 bp, Artificial Sequence
  Synthetic
cgccaacagagccgagggtg

SEQ ID NO: 36295 - DNA, 20 bp, Artificial Sequence
  Synthetic
gccgagggtgtggagtatgc

SEQ ID NO: 36296 - DNA, 20 bp, Artificial Sequence
  Synthetic
cccggcatactccacaccct

SEQ ID NO: 36297 - DNA, 20 bp, Artificial Sequence
  Synthetic
ccgagggtgtggagtatgcc

SEQ ID NO: 36298 - DNA, 20 bp, Artificial Sequence
  Synthetic
cgagggtgtggagtatgccg

SEQ ID NO: 36299 - DNA, 20 bp, Artificial Sequence
  Synthetic
cctcttgggtctgacagccc

SEQ ID NO: 36300 - DNA, 20 bp, Artificial Sequence
  Synthetic
ccggggctgtcagacccaag

SEQ ID NO: 36301 - DNA, 20 bp, Artificial Sequence
  Synthetic
tgtcagacccaagaggattg

SEQ ID NO: 36302 - DNA, 20 bp, Artificial Sequence
  Synthetic
gcaatggccacaatcctctt

SEQ ID NO: 36303 - DNA, 20 bp, Artificial Sequence
  Synthetic
ggcaatggccacaatcctct

SEQ ID NO: 36304 - DNA, 20 bp, Artificial Sequence
  Synthetic
ggcgaaggcagatggggcaa

SEQ ID NO: 36305 - DNA, 20 bp, Artificial Sequence
  Synthetic
ggggagggcgaaggcagatg

SEQ ID NO: 36306 - DNA, 20 bp, Artificial Sequence
  Synthetic
cggggagggcgaaggcagat

SEQ ID NO: 36307 - DNA, 20 bp, Artificial Sequence
  Synthetic
gcggggagggcgaaggcaga

SEQ ID NO: 36308 - DNA, 20 bp, Artificial Sequence
  Synthetic
tgccttcgccctccccgccc

SEQ ID NO: 36309 - DNA, 20 bp, Artificial Sequence
  Synthetic
gaccagggcggggagggcga

SEQ ID NO: 36310 - DNA, 20 bp, Artificial Sequence
  Synthetic
gccctccccgccctggtctc

SEQ ID NO: 36311 - DNA, 20 bp, Artificial Sequence
  Synthetic
gcctgagaccagggcgggga

SEQ ID NO: 36312 - DNA, 20 bp, Artificial Sequence
  Synthetic
cgcctgagaccagggcgggg

SEQ ID NO: 36313 - DNA, 20 bp, Artificial Sequence
  Synthetic
tggcgcctgagaccagggcg

SEQ ID NO: 36314 - DNA, 20 bp, Artificial Sequence
  Synthetic
ctggcgcctgagaccagggc

SEQ ID NO: 36315 - DNA, 20 bp, Artificial Sequence
  Synthetic
actggcgcctgagaccaggg

SEQ ID NO: 36316 - DNA, 20 bp, Artificial Sequence
  Synthetic
gccctggtctcaggcgccag

SEQ ID NO: 36317 - DNA, 20 bp, Artificial Sequence
  Synthetic
tccactggcgcctgagacca

SEQ ID NO: 36318 - DNA, 20 bp, Artificial Sequence
  Synthetic
ttccactggcgcctgagacc

SEQ ID NO: 36319 - DNA, 20 bp, Artificial Sequence
  Synthetic
gtcgctggacacatttccac

SEQ ID NO: 36320 - DNA, 20 bp, Artificial Sequence
  Synthetic
tcacccgtaggcaacgtcgc

SEQ ID NO: 36321 - DNA, 20 bp, Artificial Sequence
  Synthetic
tggcctccatggctgaggac

SEQ ID NO: 36322 - DNA, 20 bp, Artificial Sequence
  Synthetic
ctccatggctgaggactggc

SEQ ID NO: 36323 - DNA, 20 bp, Artificial Sequence
  Synthetic
tgaggactggctggactgcc

SEQ ID NO: 36324 - DNA, 20 bp, Artificial Sequence
  Synthetic
ctggctggactgcccggccc

SEQ ID NO: 36325 - DNA, 20 bp, Artificial Sequence
  Synthetic
tggctggactgcccggccct

SEQ ID NO: 36326 - DNA, 20 bp, Artificial Sequence
  Synthetic
gactgcccggccctgggccc

SEQ ID NO: 36327 - DNA, 20 bp, Artificial Sequence
  Synthetic
gcccggccctgggccctggc

SEQ ID NO: 36328 - DNA, 20 bp, Artificial Sequence
  Synthetic
tccagccagggcccagggcc

SEQ ID NO: 36329 - DNA, 20 bp, Artificial Sequence
  Synthetic
ttccagccagggcccagggc

SEQ ID NO: 36330 - DNA, 20 bp, Artificial Sequence
  Synthetic
gcgcttccagccagggccca

SEQ ID NO: 36331 - DNA, 20 bp, Artificial Sequence
  Synthetic
ggcgcttccagccagggccc

SEQ ID NO: 36332 - DNA, 20 bp, Artificial Sequence
  Synthetic
cttcgcggcgcttccagcca

SEQ ID NO: 36333 - DNA, 20 bp, Artificial Sequence
  Synthetic
acttcgcggcgcttccagcc

SEQ ID NO: 36334 - DNA, 20 bp, Artificial Sequence
  Synthetic
ctgacttgcgaaagacttcg

SEQ ID NO: 36335 - DNA, 20 bp, Artificial Sequence
  Synthetic
cgcgaagtctttcgcaagtc

SEQ ID NO: 36336 - DNA, 20 bp, Artificial Sequence
  Synthetic
gcgaagtctttcgcaagtca

SEQ ID NO: 36337 - DNA, 20 bp, Artificial Sequence
  Synthetic
cgaagtctttcgcaagtcag

SEQ ID NO: 36338 - DNA, 20 bp, Artificial Sequence
  Synthetic
cgcaagtcaggggccacctg

SEQ ID NO: 36339 - DNA, 20 bp, Artificial Sequence
  Synthetic
ggtgtctgagcgtccacagg

SEQ ID NO: 36340 - DNA, 20 bp, Artificial Sequence
  Synthetic
ataggtgtctgagcgtccac

SEQ ID NO: 36341 - DNA, 20 bp, Artificial Sequence
  Synthetic
gctcagacacctattaccag

SEQ ID NO: 36342 - DNA, 20 bp, Artificial Sequence
  Synthetic
cacccagtacctctggtaat

SEQ ID NO: 36343 - DNA, 20 bp, Artificial Sequence
  Synthetic
cactacccacccagtacctc

SEQ ID NO: 36344 - DNA, 20 bp, Artificial Sequence
  Synthetic
tggcccatccctagccccac

SEQ ID NO: 36345 - DNA, 20 bp, Artificial Sequence
  Synthetic
tccctagccccacaggagac

SEQ ID NO: 36346 - DNA, 20 bp, Artificial Sequence
  Synthetic
ttcggatcctgtctcctgtg

SEQ ID NO: 36347 - DNA, 20 bp, Artificial Sequence
  Synthetic
cttcggatcctgtctcctgt

SEQ ID NO: 36348 - DNA, 20 bp, Artificial Sequence
  Synthetic
gcttcggatcctgtctcctg

SEQ ID NO: 36349 - DNA, 20 bp, Artificial Sequence
  Synthetic
gagtcagctcaactttgctt

SEQ ID NO: 36350 - DNA, 20 bp, Artificial Sequence
  Synthetic
agttgagctgactcgatacc

SEQ ID NO: 36351 - DNA, 20 bp, Artificial Sequence
  Synthetic
gttgagctgactcgatacct

SEQ ID NO: 36352 - DNA, 20 bp, Artificial Sequence
  Synthetic
tgagatcacacgcagggccc

SEQ ID NO: 36353 - DNA, 20 bp, Artificial Sequence
  Synthetic
agagggtgagatcacacgca

SEQ ID NO: 36354 - DNA, 20 bp, Artificial Sequence
  Synthetic
aagagggtgagatcacacgc

SEQ ID NO: 36355 - DNA, 20 bp, Artificial Sequence
  Synthetic
accctcttcgacttcaaaca

SEQ ID NO: 36356 - DNA, 20 bp, Artificial Sequence
  Synthetic
gccttgtttgaagtcgaaga

SEQ ID NO: 36357 - DNA, 20 bp, Artificial Sequence
  Synthetic
tgccttgtttgaagtcgaag

SEQ ID NO: 36358 - DNA, 20 bp, Artificial Sequence
  Synthetic
gggccacggagagcgggaag

SEQ ID NO: 36359 - DNA, 20 bp, Artificial Sequence
  Synthetic
cacggagagcgggaagagga

SEQ ID NO: 36360 - DNA, 20 bp, Artificial Sequence
  Synthetic
cgggaagaggatggattgcc

SEQ ID NO: 36361 - DNA, 20 bp, Artificial Sequence
  Synthetic
gattgcccggccctcccccc

SEQ ID NO: 36362 - DNA, 20 bp, Artificial Sequence
  Synthetic
gcccggccctcccccccgga

SEQ ID NO: 36363 - DNA, 20 bp, Artificial Sequence
  Synthetic
tccatccgggggggagggcc

SEQ ID NO: 36364 - DNA, 20 bp, Artificial Sequence
  Synthetic
ttccatccgggggggagggc

SEQ ID NO: 36365 - DNA, 20 bp, Artificial Sequence
  Synthetic
cttcttccatccggggggga

SEQ ID NO: 36366 - DNA, 20 bp, Artificial Sequence
  Synthetic
ccttcttccatccggggggg

SEQ ID NO: 36367 - DNA, 20 bp, Artificial Sequence
  Synthetic
cctcccccccggatggaaga

SEQ ID NO: 36368 - DNA, 20 bp, Artificial Sequence
  Synthetic
cctccttcttccatccgggg

SEQ ID NO: 36369 - DNA, 20 bp, Artificial Sequence
  Synthetic
cccccccggatggaagaagg

SEQ ID NO: 36370 - DNA, 20 bp, Artificial Sequence
  Synthetic
tcctccttcttccatccggg

SEQ ID NO: 36371 - DNA, 20 bp, Artificial Sequence
  Synthetic
ttcctccttcttccatccgg

SEQ ID NO: 36372 - DNA, 20 bp, Artificial Sequence
  Synthetic
cttcctccttcttccatccg

SEQ ID NO: 36373 - DNA, 20 bp, Artificial Sequence
  Synthetic
acttcctccttcttccatcc

SEQ ID NO: 36374 - DNA, 20 bp, Artificial Sequence
  Synthetic
cacttcctccttcttccatc

SEQ ID NO: 36375 - DNA, 20 bp, Artificial Sequence
  Synthetic
gaggaagtgatccgaaaatc

SEQ ID NO: 36376 - DNA, 20 bp, Artificial Sequence
  Synthetic
aggaagtgatccgaaaatct

SEQ ID NO: 36377 - DNA, 20 bp, Artificial Sequence
  Synthetic
cagcacttagcccagatttt

SEQ ID NO: 36378 - DNA, 20 bp, Artificial Sequence
  Synthetic
cgaaaatctgggctaagtgc

SEQ ID NO: 36379 - DNA, 20 bp, Artificial Sequence
  Synthetic
agagcgatgtctactacttc

SEQ ID NO: 36380 - DNA, 20 bp, Artificial Sequence
  Synthetic
ttactttcttctagtccaag

SEQ ID NO: 36381 - DNA, 20 bp, Artificial Sequence
  Synthetic
cttctgaacttcttaccact

SEQ ID NO: 36382 - DNA, 20 bp, Artificial Sequence
  Synthetic
gttcagaagcaagcctcagt

SEQ ID NO: 36383 - DNA, 20 bp, Artificial Sequence
  Synthetic
gaagcaagcctcagttggca

SEQ ID NO: 36384 - DNA, 20 bp, Artificial Sequence
  Synthetic
gcctcagttggcaaggtacc

SEQ ID NO: 36385 - DNA, 20 bp, Artificial Sequence
  Synthetic
cccaggtaccttgccaactg

SEQ ID NO: 36386 - DNA, 20 bp, Artificial Sequence
  Synthetic
cctcagttggcaaggtacct

SEQ ID NO: 36387 - DNA, 20 bp, Artificial Sequence
  Synthetic
tgagatcaacagtatttccc

SEQ ID NO: 36388 - DNA, 20 bp, Artificial Sequence
  Synthetic
agcagttttgacttcagaac

SEQ ID NO: 36389 - DNA, 20 bp, Artificial Sequence
  Synthetic
agaacaaattataaaaacca

SEQ ID NO: 36390 - DNA, 20 bp, Artificial Sequence
  Synthetic
aaaaccatggaactacccaa

SEQ ID NO: 36391 - DNA, 20 bp, Artificial Sequence
  Synthetic
aagacctttgggtagttcca

SEQ ID NO: 36392 - DNA, 20 bp, Artificial Sequence
  Synthetic
gaactacccaaaggtcttca

SEQ ID NO: 36393 - DNA, 20 bp, Artificial Sequence
  Synthetic
ataataccttgaagaccttt

SEQ ID NO: 36394 - DNA, 20 bp, Artificial Sequence
  Synthetic
gataataccttgaagacctt

SEQ ID NO: 36395 - DNA, 20 bp, Artificial Sequence
  Synthetic
ttgtttctcattgcaggagt

SEQ ID NO: 36396 - DNA, 20 bp, Artificial Sequence
  Synthetic
ctcattgcaggagttggtcc

SEQ ID NO: 36397 - DNA, 20 bp, Artificial Sequence
  Synthetic
agggtctcatcattgctacc

SEQ ID NO: 36398 - DNA, 20 bp, Artificial Sequence
  Synthetic
actggcaacagcagataaaa

SEQ ID NO: 36399 - DNA, 20 bp, Artificial Sequence
  Synthetic
cactggcaacagcagataaa

SEQ ID NO: 36400 - DNA, 20 bp, Artificial Sequence
  Synthetic
agagcttgtgtgcaaagcac

SEQ ID NO: 36401 - DNA, 20 bp, Artificial Sequence
  Synthetic
acaagctctgcgccaatcac

SEQ ID NO: 36402 - DNA, 20 bp, Artificial Sequence
  Synthetic
caagctctgcgccaatcaca

SEQ ID NO: 36403 - DNA, 20 bp, Artificial Sequence
  Synthetic
gcggagacttgccctgtgat

SEQ ID NO: 36404 - DNA, 20 bp, Artificial Sequence
  Synthetic
agggcaagtctccgctgctg

SEQ ID NO: 36405 - DNA, 20 bp, Artificial Sequence
  Synthetic
agggttcttttccacagcag

SEQ ID NO: 36406 - DNA, 20 bp, Artificial Sequence
  Synthetic
tggaaaagaaccctgctgtt

SEQ ID NO: 36407 - DNA, 20 bp, Artificial Sequence
  Synthetic
atgtgttaagccaaacagca

SEQ ID NO: 36408 - DNA, 20 bp, Artificial Sequence
  Synthetic
gatgtgttaagccaaacagc

SEQ ID NO: 36409 - DNA, 20 bp, Artificial Sequence
  Synthetic
acaataaaagctttgcagag

SEQ ID NO: 36410 - DNA, 20 bp, Artificial Sequence
  Synthetic
gacaataaaagctttgcaga

SEQ ID NO: 36411 - DNA, 20 bp, Artificial Sequence
  Synthetic
tgacaataaaagctttgcag

SEQ ID NO: 36412 - DNA, 20 bp, Artificial Sequence
  Synthetic
ttgtcacagatgaagacatc

SEQ ID NO: 36413 - DNA, 20 bp, Artificial Sequence
  Synthetic
tctgtttttaaaaaggaaac

SEQ ID NO: 36414 - DNA, 20 bp, Artificial Sequence
  Synthetic
acagcaagtacgcaagaaat

SEQ ID NO: 36415 - DNA, 20 bp, Artificial Sequence
  Synthetic
gaaattggaagaagcactga

SEQ ID NO: 36416 - DNA, 20 bp, Artificial Sequence
  Synthetic
aggagccgggcgcaatggag

SEQ ID NO: 36417 - DNA, 20 bp, Artificial Sequence
  Synthetic
cgggcgcaatggagcggaag

SEQ ID NO: 36418 - DNA, 20 bp, Artificial Sequence
  Synthetic
gcgcaatggagcggaagagg

SEQ ID NO: 36419 - DNA, 20 bp, Artificial Sequence
  Synthetic
cgcaatggagcggaagaggt

SEQ ID NO: 36420 - DNA, 20 bp, Artificial Sequence
  Synthetic
gcggaagaggtgggagtgcc

SEQ ID NO: 36421 - DNA, 20 bp, Artificial Sequence
  Synthetic
ggagtgcccggcgctcccgc

SEQ ID NO: 36422 - DNA, 20 bp, Artificial Sequence
  Synthetic
gagtgcccggcgctcccgca

SEQ ID NO: 36423 - DNA, 20 bp, Artificial Sequence
  Synthetic
gcccggcgctcccgcagggc

SEQ ID NO: 36424 - DNA, 20 bp, Artificial Sequence
  Synthetic
cccagccctgcgggagcgcc

SEQ ID NO: 36425 - DNA, 20 bp, Artificial Sequence
  Synthetic
cccggcgctcccgcagggct

SEQ ID NO: 36426 - DNA, 20 bp, Artificial Sequence
  Synthetic
tcccagccctgcgggagcgc

SEQ ID NO: 36427 - DNA, 20 bp, Artificial Sequence
  Synthetic
cgctcccgcagggctgggag

SEQ ID NO: 36428 - DNA, 20 bp, Artificial Sequence
  Synthetic
gctcccgcagggctgggaga

SEQ ID NO: 36429 - DNA, 20 bp, Artificial Sequence
  Synthetic
cttccctctcccagccctgc

SEQ ID NO: 36430 - DNA, 20 bp, Artificial Sequence
  Synthetic
tcttccctctcccagccctg

SEQ ID NO: 36431 - DNA, 20 bp, Artificial Sequence
  Synthetic
agagggaagaagtgcccaga

SEQ ID NO: 36432 - DNA, 20 bp, Artificial Sequence
  Synthetic
ggaagaagtgcccagaaggt

SEQ ID NO: 36433 - DNA, 20 bp, Artificial Sequence
  Synthetic
gaagaagtgcccagaaggtc

SEQ ID NO: 36434 - DNA, 20 bp, Artificial Sequence
  Synthetic
aagaagtgcccagaaggtcg

SEQ ID NO: 36435 - DNA, 20 bp, Artificial Sequence
  Synthetic
gcccagaaggtcggggctgt

SEQ ID NO: 36436 - DNA, 20 bp, Artificial Sequence
  Synthetic
gccgacagccccgaccttct

SEQ ID NO: 36437 - DNA, 20 bp, Artificial Sequence
  Synthetic
ggccgacagccccgaccttc

SEQ ID NO: 36438 - DNA, 20 bp, Artificial Sequence
  Synthetic
agaaggtcggggctgtcggc

SEQ ID NO: 36439 - DNA, 20 bp, Artificial Sequence
  Synthetic
cggggctgtcggccggccac

SEQ ID NO: 36440 - DNA, 20 bp, Artificial Sequence
  Synthetic
ggggctgtcggccggccaca

SEQ ID NO: 36441 - DNA, 20 bp, Artificial Sequence
  Synthetic
gtaaaagacatccctgtggc

SEQ ID NO: 36442 - DNA, 20 bp, Artificial Sequence
  Synthetic
tatagtaaaagacatccctg

SEQ ID NO: 36443 - DNA, 20 bp, Artificial Sequence
  Synthetic
acagggatgtcttttactat

SEQ ID NO: 36444 - DNA, 20 bp, Artificial Sequence
  Synthetic
ccgcctccccgcagcccgag

SEQ ID NO: 36445 - DNA, 20 bp, Artificial Sequence
  Synthetic
cgcctccccgcagcccgagc

SEQ ID NO: 36446 - DNA, 20 bp, Artificial Sequence
  Synthetic
tgcggaacttcttcccgctc

SEQ ID NO: 36447 - DNA, 20 bp, Artificial Sequence
  Synthetic
ctgcggaacttcttcccgct

SEQ ID NO: 36448 - DNA, 20 bp, Artificial Sequence
  Synthetic
gttccgcagcaagccgcagc

SEQ ID NO: 36449 - DNA, 20 bp, Artificial Sequence
  Synthetic
gcgccagctgcggcttgctg

SEQ ID NO: 36450 - DNA, 20 bp, Artificial Sequence
  Synthetic
gccgcagctggcgcgctacc

SEQ ID NO: 36451 - DNA, 20 bp, Artificial Sequence
  Synthetic
cccaggtagcgcgccagctg

SEQ ID NO: 36452 - DNA, 20 bp, Artificial Sequence
  Synthetic
ccgcagctggcgcgctacct

SEQ ID NO: 36453 - DNA, 20 bp, Artificial Sequence
  Synthetic
cagctggcgcgctacctggg

SEQ ID NO: 36454 - DNA, 20 bp, Artificial Sequence
  Synthetic
gcgctacctgggcggctcca

SEQ ID NO: 36455 - DNA, 20 bp, Artificial Sequence
  Synthetic
tcaggtccatggagccgccc

SEQ ID NO: 36456 - DNA, 20 bp, Artificial Sequence
  Synthetic
gtcgaaggtgctcaggtcca

SEQ ID NO: 36457 - DNA, 20 bp, Artificial Sequence
  Synthetic
tgcggaagtcgaaggtgctc

SEQ ID NO: 36458 - DNA, 20 bp, Artificial Sequence
  Synthetic
gagcaccttcgacttccgca

SEQ ID NO: 36459 - DNA, 20 bp, Artificial Sequence
  Synthetic
agcaccttcgacttccgcac

SEQ ID NO: 36460 - DNA, 20 bp, Artificial Sequence
  Synthetic
cttgcccgtgcggaagtcga

SEQ ID NO: 36461 - DNA, 20 bp, Artificial Sequence
  Synthetic
tcatcagcatcttgcccgtg

SEQ ID NO: 36462 - DNA, 20 bp, Artificial Sequence
  Synthetic
gaacgccttcgacattgctg

SEQ ID NO: 36463 - DNA, 20 bp, Artificial Sequence
  Synthetic
cagctcctcagcaatgtcga

SEQ ID NO: 36464 - DNA, 20 bp, Artificial Sequence
  Synthetic
cttcgacattgctgaggagc

SEQ ID NO: 36465 - DNA, 20 bp, Artificial Sequence
  Synthetic
tgaggagctggtcaagacca

SEQ ID NO: 36466 - DNA, 20 bp, Artificial Sequence
  Synthetic
caagaccatggacctcccca

SEQ ID NO: 36467 - DNA, 20 bp, Artificial Sequence
  Synthetic
aagaccatggacctccccaa

SEQ ID NO: 36468 - DNA, 20 bp, Artificial Sequence
  Synthetic
caggcccttggggaggtcca

SEQ ID NO: 36469 - DNA, 20 bp, Artificial Sequence
  Synthetic
ggacctccccaagggcctgc

SEQ ID NO: 36470 - DNA, 20 bp, Artificial Sequence
  Synthetic
gacctccccaagggcctgca

SEQ ID NO: 36471 - DNA, 20 bp, Artificial Sequence
  Synthetic
caccctgcaggcccttgggg

SEQ ID NO: 36472 - DNA, 20 bp, Artificial Sequence
  Synthetic
gctcaccctgcaggcccttg

SEQ ID NO: 36473 - DNA, 20 bp, Artificial Sequence
  Synthetic
cgctcaccctgcaggccctt

SEQ ID NO: 36474 - DNA, 20 bp, Artificial Sequence
  Synthetic
ccgctcaccctgcaggccct

SEQ ID NO: 36475 - DNA, 20 bp, Artificial Sequence
  Synthetic
agggtgcccgctcaccctgc

SEQ ID NO: 36476 - DNA, 20 bp, Artificial Sequence
  Synthetic
gtccactgcctggcaggggt

SEQ ID NO: 36477 - DNA, 20 bp, Artificial Sequence
  Synthetic
tgcctggcaggggtgggacc

SEQ ID NO: 36478 - DNA, 20 bp, Artificial Sequence
  Synthetic
aggggtgggacctggctgca

SEQ ID NO: 36479 - DNA, 20 bp, Artificial Sequence
  Synthetic
agcgtctcatccgtgcagcc

SEQ ID NO: 36480 - DNA, 20 bp, Artificial Sequence
  Synthetic
cacggatgagacgctgctgt

SEQ ID NO: 36481 - DNA, 20 bp, Artificial Sequence
  Synthetic
agtgtgcagggcgctggcga

SEQ ID NO: 36482 - DNA, 20 bp, Artificial Sequence
  Synthetic
ggtgctagtgtgcagggcgc

SEQ ID NO: 36483 - DNA, 20 bp, Artificial Sequence
  Synthetic
gggcatggtgctagtgtgca

SEQ ID NO: 36484 - DNA, 20 bp, Artificial Sequence
  Synthetic
tgggcatggtgctagtgtgc

SEQ ID NO: 36485 - DNA, 20 bp, Artificial Sequence
  Synthetic
cactagcaccatgcccatca

SEQ ID NO: 36486 - DNA, 20 bp, Artificial Sequence
  Synthetic
actagcaccatgcccatcac

SEQ ID NO: 36487 - DNA, 20 bp, Artificial Sequence
  Synthetic
gagctgtcccgtgatgggca

SEQ ID NO: 36488 - DNA, 20 bp, Artificial Sequence
  Synthetic
gcccatcacgggacagctct

SEQ ID NO: 36489 - DNA, 20 bp, Artificial Sequence
  Synthetic
gccgagagctgtcccgtgat

SEQ ID NO: 36490 - DNA, 20 bp, Artificial Sequence
  Synthetic
ggccgagagctgtcccgtga

SEQ ID NO: 36491 - DNA, 20 bp, Artificial Sequence
  Synthetic
gggacagctctcggccgccg

SEQ ID NO: 36492 - DNA, 20 bp, Artificial Sequence
  Synthetic
gccgccgtggagaagaaccc

SEQ ID NO: 36493 - DNA, 20 bp, Artificial Sequence
  Synthetic
gccggggttcttctccacgg

SEQ ID NO: 36494 - DNA, 20 bp, Artificial Sequence
  Synthetic
tacgccggggttcttctcca

SEQ ID NO: 36495 - DNA, 20 bp, Artificial Sequence
  Synthetic
tggagaagaaccccggcgta

SEQ ID NO: 36496 - DNA, 20 bp, Artificial Sequence
  Synthetic
tggtgttgagccatacgccg

SEQ ID NO: 36497 - DNA, 20 bp, Artificial Sequence
  Synthetic
gtggtgttgagccatacgcc

SEQ ID NO: 36498 - DNA, 20 bp, Artificial Sequence
  Synthetic
cgtggtgttgagccatacgc

SEQ ID NO: 36499 - DNA, 20 bp, Artificial Sequence
  Synthetic
ggctttgcacaggggctgcg

SEQ ID NO: 36500 - DNA, 20 bp, Artificial Sequence
  Synthetic
gcccctgtgcaaagccttca

SEQ ID NO: 36501 - DNA, 20 bp, Artificial Sequence
  Synthetic
accatgaaggctttgcacag

SEQ ID NO: 36502 - DNA, 20 bp, Artificial Sequence
  Synthetic
caccatgaaggctttgcaca

SEQ ID NO: 36503 - DNA, 20 bp, Artificial Sequence
  Synthetic
tcaccatgaaggctttgcac

SEQ ID NO: 36504 - DNA, 20 bp, Artificial Sequence
  Synthetic
agccttcatggtgaccgacg

SEQ ID NO: 36505 - DNA, 20 bp, Artificial Sequence
  Synthetic
gtcctcgtcggtcaccatga

SEQ ID NO: 36506 - DNA, 20 bp, Artificial Sequence
  Synthetic
tggtgaccgacgaggacatc

SEQ ID NO: 36507 - DNA, 20 bp, Artificial Sequence
  Synthetic
gggctacctgatgtcctcgt

SEQ ID NO: 36508 - DNA, 20 bp, Artificial Sequence
  Synthetic
tccatgtgtccccaggaagc

SEQ ID NO: 36509 - DNA, 20 bp, Artificial Sequence
  Synthetic
ccccaggaagcaggaagagc

SEQ ID NO: 36510 - DNA, 20 bp, Artificial Sequence
  Synthetic
caccagctcttcctgcttcc

SEQ ID NO: 36511 - DNA, 20 bp, Artificial Sequence
  Synthetic
gcaggaagagctggtgcagc

SEQ ID NO: 36512 - DNA, 20 bp, Artificial Sequence
  Synthetic
aagagctggtgcagcaggtg

SEQ ID NO: 36513 - DNA, 20 bp, Artificial Sequence
  Synthetic
tggtgcagcaggtgcggaag

SEQ ID NO: 36514 - DNA, 20 bp, Artificial Sequence
  Synthetic
gcagcaggtgcggaagcggc

SEQ ID NO: 36515 - DNA, 20 bp, Artificial Sequence
  Synthetic
gcaggtgcggaagcggctgg

SEQ ID NO: 36516 - DNA, 20 bp, Artificial Sequence
  Synthetic
ggtgcggaagcggctggagg

SEQ ID NO: 36517 - DNA, 20 bp, Artificial Sequence
  Synthetic
gcggctggaggaggcgctga

SEQ ID NO: 36518 - DNA, 20 bp, Artificial Sequence
  Synthetic
ctccaggcttacagcagtgc

SEQ ID NO: 36519 - DNA, 20 bp, Artificial Sequence
  Synthetic
aggagaactttcaagcactt

SEQ ID NO: 36520 - DNA, 20 bp, Artificial Sequence
  Synthetic
gacaagtttttgcaaggtat

SEQ ID NO: 36521 - DNA, 20 bp, Artificial Sequence
  Synthetic
actagggacaagtttttgca

SEQ ID NO: 36522 - DNA, 20 bp, Artificial Sequence
  Synthetic
aaacttgtccctagttacac

SEQ ID NO: 36523 - DNA, 20 bp, Artificial Sequence
  Synthetic
cttgtccctagttacacagg

SEQ ID NO: 36524 - DNA, 20 bp, Artificial Sequence
  Synthetic
gagatccacctgtgtaacta

SEQ ID NO: 36525 - DNA, 20 bp, Artificial Sequence
  Synthetic
agagatccacctgtgtaact

SEQ ID NO: 36526 - DNA, 20 bp, Artificial Sequence
  Synthetic
ttacacaggtggatctctgc

SEQ ID NO: 36527 - DNA, 20 bp, Artificial Sequence
  Synthetic
cacaggtggatctctgctgg

SEQ ID NO: 36528 - DNA, 20 bp, Artificial Sequence
  Synthetic
ctgctggaggatcttgccag

SEQ ID NO: 36529 - DNA, 20 bp, Artificial Sequence
  Synthetic
ggaggatcttgccagtggtc

SEQ ID NO: 36530 - DNA, 20 bp, Artificial Sequence
  Synthetic
gcaggagtgctccagaccac

SEQ ID NO: 36531 - DNA, 20 bp, Artificial Sequence
  Synthetic
ggcaaggtggggcatggggc

SEQ ID NO: 36532 - DNA, 20 bp, Artificial Sequence
  Synthetic
agcaggcaaggtggggcatg

SEQ ID NO: 36533 - DNA, 20 bp, Artificial Sequence
  Synthetic
gagcaggcaaggtggggcat

SEQ ID NO: 36534 - DNA, 20 bp, Artificial Sequence
  Synthetic
agagcaggcaaggtggggca

SEQ ID NO: 36535 - DNA, 20 bp, Artificial Sequence
  Synthetic
tctgaagagcaggcaaggtg

SEQ ID NO: 36536 - DNA, 20 bp, Artificial Sequence
  Synthetic
atctgaagagcaggcaaggt

SEQ ID NO: 36537 - DNA, 20 bp, Artificial Sequence
  Synthetic
catctgaagagcaggcaagg

SEQ ID NO: 36538 - DNA, 20 bp, Artificial Sequence
  Synthetic
ccgcatctgaagagcaggca

SEQ ID NO: 36539 - DNA, 20 bp, Artificial Sequence
  Synthetic
ccttgcctgctcttcagatg

SEQ ID NO: 36540 - DNA, 20 bp, Artificial Sequence
  Synthetic
tgcctgctcttcagatgcgg

SEQ ID NO: 36541 - DNA, 20 bp, Artificial Sequence
  Synthetic
ctccaccgcatctgaagagc

SEQ ID NO: 36542 - DNA, 20 bp, Artificial Sequence
  Synthetic
ggtggagataattcctgcag

SEQ ID NO: 36543 - DNA, 20 bp, Artificial Sequence
  Synthetic
gtggagataattcctgcaga

SEQ ID NO: 36544 - DNA, 20 bp, Artificial Sequence
  Synthetic
gataattcctgcagagggag

SEQ ID NO: 36545 - DNA, 20 bp, Artificial Sequence
  Synthetic
ataattcctgcagagggagt

SEQ ID NO: 36546 - DNA, 20 bp, Artificial Sequence
  Synthetic
gagatacccactccctctgc

SEQ ID NO: 36547 - DNA, 20 bp, Artificial Sequence
  Synthetic
gctcctctgcaaacaatttc

SEQ ID NO: 36548 - DNA, 20 bp, Artificial Sequence
  Synthetic
taaccagaaattgtttgcag

SEQ ID NO: 36549 - DNA, 20 bp, Artificial Sequence
  Synthetic
caaacaatttctggttactg

SEQ ID NO: 36550 - DNA, 20 bp, Artificial Sequence
  Synthetic
tggttactgaggaagatatc

SEQ ID NO: 36551 - DNA, 20 bp, Artificial Sequence
  Synthetic
tgaggaagatatcaggaaac

SEQ ID NO: 36552 - DNA, 20 bp, Artificial Sequence
  Synthetic
gaagatatcaggaaacagga

SEQ ID NO: 36553 - DNA, 20 bp, Artificial Sequence
  Synthetic
aagatatcaggaaacaggaa

SEQ ID NO: 36554 - DNA, 20 bp, Artificial Sequence
  Synthetic
ctgcagccctgcagcagcca

SEQ ID NO: 36555 - DNA, 20 bp, Artificial Sequence
  Synthetic
ccctgcagcagccaaggaga

SEQ ID NO: 36556 - DNA, 20 bp, Artificial Sequence
  Synthetic
gtggacttgaaccttctcct

SEQ ID NO: 36557 - DNA, 20 bp, Artificial Sequence
  Synthetic
aggttcaagtccactgcatt

SEQ ID NO: 36558 - DNA, 20 bp, Artificial Sequence
  Synthetic
aagacgctctccaaatgcag

SEQ ID NO: 36559 - DNA, 20 bp, Artificial Sequence
  Synthetic
cgtcttaagtatccttgcac

SEQ ID NO: 36560 - DNA, 20 bp, Artificial Sequence
  Synthetic
gtcttaagtatccttgcacc

SEQ ID NO: 36561 - DNA, 20 bp, Artificial Sequence
  Synthetic
tcttaagtatccttgcaccg

SEQ ID NO: 36562 - DNA, 20 bp, Artificial Sequence
  Synthetic
aagtatccttgcaccgggga

SEQ ID NO: 36563 - DNA, 20 bp, Artificial Sequence
  Synthetic
atccttgcaccggggacggc

SEQ ID NO: 36564 - DNA, 20 bp, Artificial Sequence
  Synthetic
caccggccgtccccggtgca

SEQ ID NO: 36565 - DNA, 20 bp, Artificial Sequence
  Synthetic
agagattcaccggccgtccc

SEQ ID NO: 36566 - DNA, 20 bp, Artificial Sequence
  Synthetic
ggggacggccggtgaatctc

SEQ ID NO: 36567 - DNA, 20 bp, Artificial Sequence
  Synthetic
agctctgtccagagattcac

SEQ ID NO: 36568 - DNA, 20 bp, Artificial Sequence
  Synthetic
ggtgaatctctggacagagc

SEQ ID NO: 36569 - DNA, 20 bp, Artificial Sequence
  Synthetic
agcccgcttgagcccacccc

SEQ ID NO: 36570 - DNA, 20 bp, Artificial Sequence
  Synthetic
gcccgcttgagcccacccct

SEQ ID NO: 36571 - DNA, 20 bp, Artificial Sequence
  Synthetic
gcccaggggtgggctcaagc

SEQ ID NO: 36572 - DNA, 20 bp, Artificial Sequence
  Synthetic
cgcccaggggtgggctcaag

SEQ ID NO: 36573 - DNA, 20 bp, Artificial Sequence
  Synthetic
cgcttgagcccacccctggg

SEQ ID NO: 36574 - DNA, 20 bp, Artificial Sequence
  Synthetic
gctggaaaccgcccaggggt

SEQ ID NO: 36575 - DNA, 20 bp, Artificial Sequence
  Synthetic
agctggaaaccgcccagggg

SEQ ID NO: 36576 - DNA, 20 bp, Artificial Sequence
  Synthetic
cacagctggaaaccgcccag

SEQ ID NO: 36577 - DNA, 20 bp, Artificial Sequence
  Synthetic
ccacagctggaaaccgccca

SEQ ID NO: 36578 - DNA, 20 bp, Artificial Sequence
  Synthetic
ccctgggcggtttccagctg

SEQ ID NO: 36579 - DNA, 20 bp, Artificial Sequence
  Synthetic
gccacagctggaaaccgccc

SEQ ID NO: 36580 - DNA, 20 bp, Artificial Sequence
  Synthetic
gggcggtttccagctgtggc

SEQ ID NO: 36581 - DNA, 20 bp, Artificial Sequence
  Synthetic
ggcggtttccagctgtggca

SEQ ID NO: 36582 - DNA, 20 bp, Artificial Sequence
  Synthetic
gcggtttccagctgtggcag

SEQ ID NO: 36583 - DNA, 20 bp, Artificial Sequence
  Synthetic
cggtttccagctgtggcagg

SEQ ID NO: 36584 - DNA, 20 bp, Artificial Sequence
  Synthetic
ggtttccagctgtggcaggg

SEQ ID NO: 36585 - DNA, 20 bp, Artificial Sequence
  Synthetic
gttggcccccctgccacagc

SEQ ID NO: 36586 - DNA, 20 bp, Artificial Sequence
  Synthetic
gtggcaggggggccaacccc

SEQ ID NO: 36587 - DNA, 20 bp, Artificial Sequence
  Synthetic
aggggggccaaccccaggaa

SEQ ID NO: 36588 - DNA, 20 bp, Artificial Sequence
  Synthetic
ggggggccaaccccaggaat

SEQ ID NO: 36589 - DNA, 20 bp, Artificial Sequence
  Synthetic
tgacaacccattcctggggt

SEQ ID NO: 36590 - DNA, 20 bp, Artificial Sequence
  Synthetic
gagctgacaacccattcctg

SEQ ID NO: 36591 - DNA, 20 bp, Artificial Sequence
  Synthetic
ggagctgacaacccattcct

SEQ ID NO: 36592 - DNA, 20 bp, Artificial Sequence
  Synthetic
gggagctgacaacccattcc

SEQ ID NO: 36593 - DNA, 20 bp, Artificial Sequence
  Synthetic
cagctcccaccgcccctctc

SEQ ID NO: 36594 - DNA, 20 bp, Artificial Sequence
  Synthetic
attggccagagaggggcggt

SEQ ID NO: 36595 - DNA, 20 bp, Artificial Sequence
  Synthetic
aattggccagagaggggcgg

SEQ ID NO: 36596 - DNA, 20 bp, Artificial Sequence
  Synthetic
accgcccctctctggccaat

SEQ ID NO: 36597 - DNA, 20 bp, Artificial Sequence
  Synthetic
accaattggccagagagggg

SEQ ID NO: 36598 - DNA, 20 bp, Artificial Sequence
  Synthetic
gtcaccaattggccagagag

SEQ ID NO: 36599 - DNA, 20 bp, Artificial Sequence
  Synthetic
agtcaccaattggccagaga

SEQ ID NO: 36600 - DNA, 20 bp, Artificial Sequence
  Synthetic
gagtcaccaattggccagag

SEQ ID NO: 36601 - DNA, 20 bp, Artificial Sequence
  Synthetic
tatctgcaggagtcaccaat

SEQ ID NO: 36602 - DNA, 20 bp, Artificial Sequence
  Synthetic
tggtgactcctgcagatatc

SEQ ID NO: 36603 - DNA, 20 bp, Artificial Sequence
  Synthetic
tcctgcagatatccggagac

SEQ ID NO: 36604 - DNA, 20 bp, Artificial Sequence
  Synthetic
gcctgtctccggatatctgc

SEQ ID NO: 36605 - DNA, 20 bp, Artificial Sequence
  Synthetic
cagatatccggagacaggcc

SEQ ID NO: 36606 - DNA, 20 bp, Artificial Sequence
  Synthetic
atatccggagacaggccagg

SEQ ID NO: 36607 - DNA, 20 bp, Artificial Sequence
  Synthetic
tatccggagacaggccagga

SEQ ID NO: 36608 - DNA, 20 bp, Artificial Sequence
  Synthetic
tcaccctcctggcctgtctc

SEQ ID NO: 36609 - DNA, 20 bp, Artificial Sequence
  Synthetic
cctggctttcttcaccctcc

SEQ ID NO: 36610 - DNA, 20 bp, Artificial Sequence
  Synthetic
ccaggagggtgaagaaagcc

SEQ ID NO: 36611 - DNA, 20 bp, Artificial Sequence
  Synthetic
caggagggtgaagaaagcca

SEQ ID NO: 36612 - DNA, 20 bp, Artificial Sequence
  Synthetic
gaagaaagccagggagagac

SEQ ID NO: 36613 - DNA, 20 bp, Artificial Sequence
  Synthetic
agccagggagagactggcca

SEQ ID NO: 36614 - DNA, 20 bp, Artificial Sequence
  Synthetic
ggccttggccagtctctccc

SEQ ID NO: 36615 - DNA, 20 bp, Artificial Sequence
  Synthetic
gagactggccaaggccttgc

SEQ ID NO: 36616 - DNA, 20 bp, Artificial Sequence
  Synthetic
cctgtctgcctgcaaggcct

SEQ ID NO: 36617 - DNA, 20 bp, Artificial Sequence
  Synthetic
tgccgtaagtctgtcccatg

SEQ ID NO: 36618 - DNA, 20 bp, Artificial Sequence
  Synthetic
atccacatgggacagactta

SEQ ID NO: 36619 - DNA, 20 bp, Artificial Sequence
  Synthetic
gtaagtctgtcccatgtgga

SEQ ID NO: 36620 - DNA, 20 bp, Artificial Sequence
  Synthetic
taagtctgtcccatgtggat

SEQ ID NO: 36621 - DNA, 20 bp, Artificial Sequence
  Synthetic
caactctttcccatccacat

SEQ ID NO: 36622 - DNA, 20 bp, Artificial Sequence
  Synthetic
acaactctttcccatccaca

SEQ ID NO: 36623 - DNA, 20 bp, Artificial Sequence
  Synthetic
gggaaagagttgtgaagcaa

SEQ ID NO: 36624 - DNA, 20 bp, Artificial Sequence
  Synthetic
gttgtgaagcaaaggttatt

SEQ ID NO: 36625 - DNA, 20 bp, Artificial Sequence
  Synthetic
ttgtgaagcaaaggttattt

SEQ ID NO: 36626 - DNA, 20 bp, Artificial Sequence
  Synthetic
aggttatttgggaagacagc

SEQ ID NO: 36627 - DNA, 20 bp, Artificial Sequence
  Synthetic
gatttgatgtgtactttatc

SEQ ID NO: 36628 - DNA, 20 bp, Artificial Sequence
  Synthetic
atatcattttctagcccaca

SEQ ID NO: 36629 - DNA, 20 bp, Artificial Sequence
  Synthetic
atctgaacttcagtccttgt

SEQ ID NO: 36630 - DNA, 20 bp, Artificial Sequence
  Synthetic
gatctgaacttcagtccttg

SEQ ID NO: 36631 - DNA, 20 bp, Artificial Sequence
  Synthetic
ataattagcaagtgaacttt

SEQ ID NO: 36632 - DNA, 20 bp, Artificial Sequence
  Synthetic
gctaattatcttcacaaaaa

SEQ ID NO: 36633 - DNA, 20 bp, Artificial Sequence
  Synthetic
acagtaaaatcaaaatcttc

SEQ ID NO: 36634 - DNA, 20 bp, Artificial Sequence
  Synthetic
attttactgtactttctaaa

SEQ ID NO: 36635 - DNA, 20 bp, Artificial Sequence
  Synthetic
ttttactgtactttctaaaa

SEQ ID NO: 36636 - DNA, 20 bp, Artificial Sequence
  Synthetic
tttactgtactttctaaaag

SEQ ID NO: 36637 - DNA, 20 bp, Artificial Sequence
  Synthetic
cgcagatcccggacacccgg

SEQ ID NO: 36638 - DNA, 20 bp, Artificial Sequence
  Synthetic
gcagatcccggacacccggc

SEQ ID NO: 36639 - DNA, 20 bp, Artificial Sequence
  Synthetic
cccggacacccggcgggagc

SEQ ID NO: 36640 - DNA, 20 bp, Artificial Sequence
  Synthetic
ggacacccggcgggagctgg

SEQ ID NO: 36641 - DNA, 20 bp, Artificial Sequence
  Synthetic
gagctccgccagctcccgcc

SEQ ID NO: 36642 - DNA, 20 bp, Artificial Sequence
  Synthetic
cgagctccgccagctcccgc

SEQ ID NO: 36643 - DNA, 20 bp, Artificial Sequence
  Synthetic
agctggcggagctcgtgaag

SEQ ID NO: 36644 - DNA, 20 bp, Artificial Sequence
  Synthetic
ggagctcgtgaagcggaagc

SEQ ID NO: 36645 - DNA, 20 bp, Artificial Sequence
  Synthetic
cgtgaagcggaagcaggagc

SEQ ID NO: 36646 - DNA, 20 bp, Artificial Sequence
  Synthetic
gaagcggaagcaggagctgg

SEQ ID NO: 36647 - DNA, 20 bp, Artificial Sequence
  Synthetic
tttcatctctcaggaaacat

SEQ ID NO: 36648 - DNA, 20 bp, Artificial Sequence
  Synthetic
tcaggaaacattggcaaatt

SEQ ID NO: 36649 - DNA, 20 bp, Artificial Sequence
  Synthetic
gcgacagatctatgcttttg

SEQ ID NO: 36650 - DNA, 20 bp, Artificial Sequence
  Synthetic
cgacagatctatgcttttga

SEQ ID NO: 36651 - DNA, 20 bp, Artificial Sequence
  Synthetic
tgcttttgagggaagctacc

SEQ ID NO: 36652 - DNA, 20 bp, Artificial Sequence
  Synthetic
catacatctgagtgtcttcc

SEQ ID NO: 36653 - DNA, 20 bp, Artificial Sequence
  Synthetic
ctggaagacactcagatgta

SEQ ID NO: 36654 - DNA, 20 bp, Artificial Sequence
  Synthetic
atgtatggcaatattattcg

SEQ ID NO: 36655 - DNA, 20 bp, Artificial Sequence
  Synthetic
atggcaatattattcgtggc

SEQ ID NO: 36656 - DNA, 20 bp, Artificial Sequence
  Synthetic
tggcaatattattcgtggct

SEQ ID NO: 36657 - DNA, 20 bp, Artificial Sequence
  Synthetic
atattattcgtggctgggat

SEQ ID NO: 36658 - DNA, 20 bp, Artificial Sequence
  Synthetic
tttcgacactcacttttggt

SEQ ID NO: 36659 - DNA, 20 bp, Artificial Sequence
  Synthetic
aggctttcgacactcacttt

SEQ ID NO: 36660 - DNA, 20 bp, Artificial Sequence
  Synthetic
ccttcgatcatttttgctat

SEQ ID NO: 36661 - DNA, 20 bp, Artificial Sequence
  Synthetic
ccaatagcaaaaatgatcga

SEQ ID NO: 36662 - DNA, 20 bp, Artificial Sequence
  Synthetic
gcaaaaatgatcgaaggaac

SEQ ID NO: 36663 - DNA, 20 bp, Artificial Sequence
  Synthetic
tcgaaggaaccggaagttta

SEQ ID NO: 36664 - DNA, 20 bp, Artificial Sequence
  Synthetic
gctcagcttccttaaacttc

SEQ ID NO: 36665 - DNA, 20 bp, Artificial Sequence
  Synthetic
ggaagtttaaggaagctgag

SEQ ID NO: 36666 - DNA, 20 bp, Artificial Sequence
  Synthetic
gcggctcttcagtaaatcct

SEQ ID NO: 36667 - DNA, 20 bp, Artificial Sequence
  Synthetic
tacagctgctgaggtaaccg

SEQ ID NO: 36668 - DNA, 20 bp, Artificial Sequence
  Synthetic
agggtggggtcatcatacat

SEQ ID NO: 36669 - DNA, 20 bp, Artificial Sequence
  Synthetic
cagggtggggtcatcataca

SEQ ID NO: 36670 - DNA, 20 bp, Artificial Sequence
  Synthetic
gatgaccccaccctgcctga

SEQ ID NO: 36671 - DNA, 20 bp, Artificial Sequence
  Synthetic
accccaccctgcctgaaggc

SEQ ID NO: 36672 - DNA, 20 bp, Artificial Sequence
  Synthetic
tccagccttcaggcagggtg

SEQ ID NO: 36673 - DNA, 20 bp, Artificial Sequence
  Synthetic
gtccagccttcaggcagggt

SEQ ID NO: 36674 - DNA, 20 bp, Artificial Sequence
  Synthetic
tgtccagccttcaggcaggg

SEQ ID NO: 36675 - DNA, 20 bp, Artificial Sequence
  Synthetic
ccgtgtccagccttcaggca

SEQ ID NO: 36676 - DNA, 20 bp, Artificial Sequence
  Synthetic
ccctgcctgaaggctggaca

SEQ ID NO: 36677 - DNA, 20 bp, Artificial Sequence
  Synthetic
tccgtgtccagccttcaggc

SEQ ID NO: 36678 - DNA, 20 bp, Artificial Sequence
  Synthetic
agcttccgtgtccagccttc

SEQ ID NO: 36679 - DNA, 20 bp, Artificial Sequence
  Synthetic
ggacacggaagcttaagcaa

SEQ ID NO: 36680 - DNA, 20 bp, Artificial Sequence
  Synthetic
aagcttaagcaaaggaaatc

SEQ ID NO: 36681 - DNA, 20 bp, Artificial Sequence
  Synthetic
aggaaatctggccgctctgc

SEQ ID NO: 36682 - DNA, 20 bp, Artificial Sequence
  Synthetic
ggaaatctggccgctctgct

SEQ ID NO: 36683 - DNA, 20 bp, Artificial Sequence
  Synthetic
catcatacttcccagcagag

SEQ ID NO: 36684 - DNA, 20 bp, Artificial Sequence
  Synthetic
tgtttgtccccacagtcccc

SEQ ID NO: 36685 - DNA, 20 bp, Artificial Sequence
  Synthetic
gtttgtccccacagtcccca

SEQ ID NO: 36686 - DNA, 20 bp, Artificial Sequence
  Synthetic
gagcgaaaggcttttccctg

SEQ ID NO: 36687 - DNA, 20 bp, Artificial Sequence
  Synthetic
agagcgaaaggcttttccct

SEQ ID NO: 36688 - DNA, 20 bp, Artificial Sequence
  Synthetic
tagagcgaaaggcttttccc

SEQ ID NO: 36689 - DNA, 20 bp, Artificial Sequence
  Synthetic
aaaagcctttcgctctaaag

SEQ ID NO: 36690 - DNA, 20 bp, Artificial Sequence
  Synthetic
caactccactttagagcgaa

SEQ ID NO: 36691 - DNA, 20 bp, Artificial Sequence
  Synthetic
gttgattgcgtacttcgaaa

SEQ ID NO: 36692 - DNA, 20 bp, Artificial Sequence
  Synthetic
attgcgtacttcgaaaaggt

SEQ ID NO: 36693 - DNA, 20 bp, Artificial Sequence
  Synthetic
aaaggtaggcgacacatccc

SEQ ID NO: 36694 - DNA, 20 bp, Artificial Sequence
  Synthetic
gtcaaaatcattagggtcca

SEQ ID NO: 36695 - DNA, 20 bp, Artificial Sequence
  Synthetic
agtcaaaatcattagggtcc

SEQ ID NO: 36696 - DNA, 20 bp, Artificial Sequence
  Synthetic
ccgtgaagtcaaaatcatta

SEQ ID NO: 36697 - DNA, 20 bp, Artificial Sequence
  Synthetic
ccctaatgattttgacttca

SEQ ID NO: 36698 - DNA, 20 bp, Artificial Sequence
  Synthetic
accgtgaagtcaaaatcatt

SEQ ID NO: 36699 - DNA, 20 bp, Artificial Sequence
  Synthetic
gattttgacttcacggtaac

SEQ ID NO: 36700 - DNA, 20 bp, Artificial Sequence
  Synthetic
attttgacttcacggtaact

SEQ ID NO: 36701 - DNA, 20 bp, Artificial Sequence
  Synthetic
tttctccaggtgctggtgat

SEQ ID NO: 36702 - DNA, 20 bp, Artificial Sequence
  Synthetic
ttctccaggtgctggtgatt

SEQ ID NO: 36703 - DNA, 20 bp, Artificial Sequence
  Synthetic
caggtgctggtgattgggtg

SEQ ID NO: 36704 - DNA, 20 bp, Artificial Sequence
  Synthetic
gagtgagcaactgtatgatg

SEQ ID NO: 36705 - DNA, 20 bp, Artificial Sequence
  Synthetic
agtgagcaactgtatgatgt

SEQ ID NO: 36706 - DNA, 20 bp, Artificial Sequence
  Synthetic
aactgtatgatgtgggctat

SEQ ID NO: 36707 - DNA, 20 bp, Artificial Sequence
  Synthetic
actgtatgatgtgggctatc

SEQ ID NO: 36708 - DNA, 20 bp, Artificial Sequence
  Synthetic
agtgaacatcgacatcagtg

SEQ ID NO: 36709 - DNA, 20 bp, Artificial Sequence
  Synthetic
ggttgtcatcaagcaaatga

SEQ ID NO: 36710 - DNA, 20 bp, Artificial Sequence
  Synthetic
aggaatgtaatgccacccga

SEQ ID NO: 36711 - DNA, 20 bp, Artificial Sequence
  Synthetic
gctcatctggggccgtcggg

SEQ ID NO: 36712 - DNA, 20 bp, Artificial Sequence
  Synthetic
gaagctcatctggggccgtc

SEQ ID NO: 36713 - DNA, 20 bp, Artificial Sequence
  Synthetic
agaagctcatctggggccgt

SEQ ID NO: 36714 - DNA, 20 bp, Artificial Sequence
  Synthetic
atcttcaagaagctcatctg

SEQ ID NO: 36715 - DNA, 20 bp, Artificial Sequence
  Synthetic
catcttcaagaagctcatct

SEQ ID NO: 36716 - DNA, 20 bp, Artificial Sequence
  Synthetic
ccatcttcaagaagctcatc

SEQ ID NO: 36717 - DNA, 20 bp, Artificial Sequence
  Synthetic
ccagatgagcttcttgaaga

SEQ ID NO: 36718 - DNA, 20 bp, Artificial Sequence
  Synthetic
gaagatggacatgacgcaga

SEQ ID NO: 36719 - DNA, 20 bp, Artificial Sequence
  Synthetic
gtttcctgatgcctcgttcc

SEQ ID NO: 36720 - DNA, 20 bp, Artificial Sequence
  Synthetic
tcctgatgcctcgttccagg

SEQ ID NO: 36721 - DNA, 20 bp, Artificial Sequence
  Synthetic
accacctggaacgaggcatc

SEQ ID NO: 36722 - DNA, 20 bp, Artificial Sequence
  Synthetic
tgcctcgttccaggtggtgt

SEQ ID NO: 36723 - DNA, 20 bp, Artificial Sequence
  Synthetic
gtccaacaccacctggaacg

SEQ ID NO: 36724 - DNA, 20 bp, Artificial Sequence
  Synthetic
gttccaggtggtgttggaca

SEQ ID NO: 36725 - DNA, 20 bp, Artificial Sequence
  Synthetic
ttccaggtggtgttggacaa

SEQ ID NO: 36726 - DNA, 20 bp, Artificial Sequence
  Synthetic
tgcccttgtccaacaccacc

SEQ ID NO: 36727 - DNA, 20 bp, Artificial Sequence
  Synthetic
ggtgttggacaagggcaccc

SEQ ID NO: 36728 - DNA, 20 bp, Artificial Sequence
  Synthetic
atctgtcaggacagcatcca

SEQ ID NO: 36729 - DNA, 20 bp, Artificial Sequence
  Synthetic
catctgtcaggacagcatcc

SEQ ID NO: 36730 - DNA, 20 bp, Artificial Sequence
  Synthetic
ggatgctgtcctgacagatg

SEQ ID NO: 36731 - DNA, 20 bp, Artificial Sequence
  Synthetic
tcttctcttcctcatctgtc

SEQ ID NO: 36732 - DNA, 20 bp, Artificial Sequence
  Synthetic
ggaagagaagaccttacaac

SEQ ID NO: 36733 - DNA, 20 bp, Artificial Sequence
  Synthetic
agagaagaccttacaacagg

SEQ ID NO: 36734 - DNA, 20 bp, Artificial Sequence
  Synthetic
agaccttacaacaggtggac

SEQ ID NO: 36735 - DNA, 20 bp, Artificial Sequence
  Synthetic
catcctgtccacctgttgta

SEQ ID NO: 36736 - DNA, 20 bp, Artificial Sequence
  Synthetic
acaacaggtggacaggatgc

SEQ ID NO: 36737 - DNA, 20 bp, Artificial Sequence
  Synthetic
ggtggacaggatgctggctg

SEQ ID NO: 36738 - DNA, 20 bp, Artificial Sequence
  Synthetic
gacaggatgctggctgaggt

SEQ ID NO: 36739 - DNA, 20 bp, Artificial Sequence
  Synthetic
tgaggttggccgtgtcctgc

SEQ ID NO: 36740 - DNA, 20 bp, Artificial Sequence
  Synthetic
ggttggccgtgtcctgcagg

SEQ ID NO: 36741 - DNA, 20 bp, Artificial Sequence
  Synthetic
gttggccgtgtcctgcaggt

SEQ ID NO: 36742 - DNA, 20 bp, Artificial Sequence
  Synthetic
ggccgtgtcctgcaggtggg

SEQ ID NO: 36743 - DNA, 20 bp, Artificial Sequence
  Synthetic
gaccgcccacctgcaggaca

SEQ ID NO: 36744 - DNA, 20 bp, Artificial Sequence
  Synthetic
gatagcgaccgcccacctgc

SEQ ID NO: 36745 - DNA, 20 bp, Artificial Sequence
  Synthetic
ttcagagtcgttcaccagac

SEQ ID NO: 36746 - DNA, 20 bp, Artificial Sequence
  Synthetic
cgttcaccagacaggtgtta

SEQ ID NO: 36747 - DNA, 20 bp, Artificial Sequence
  Synthetic
cagcttccataacacctgtc

SEQ ID NO: 36748 - DNA, 20 bp, Artificial Sequence
  Synthetic
ggtgttatggaagctgctga

SEQ ID NO: 36749 - DNA, 20 bp, Artificial Sequence
  Synthetic
ctgctgaaggttgtgaaatt

SEQ ID NO: 36750 - DNA, 20 bp, Artificial Sequence
  Synthetic
ttaccagcaattagcagccc

SEQ ID NO: 36751 - DNA, 20 bp, Artificial Sequence
  Synthetic
ctgccagggctgctaattgc

SEQ ID NO: 36752 - DNA, 20 bp, Artificial Sequence
  Synthetic
cagcaattagcagccctggc

SEQ ID NO: 36753 - DNA, 20 bp, Artificial Sequence
  Synthetic
ggctttggggttgcctgcca

SEQ ID NO: 36754 - DNA, 20 bp, Artificial Sequence
  Synthetic
cggctttggggttgcctgcc

SEQ ID NO: 36755 - DNA, 20 bp, Artificial Sequence
  Synthetic
ccactgctcgcgcggctttg

SEQ ID NO: 36756 - DNA, 20 bp, Artificial Sequence
  Synthetic
ccccaaagccgcgcgagcag

SEQ ID NO: 36757 - DNA, 20 bp, Artificial Sequence
  Synthetic
cccactgctcgcgcggcttt

SEQ ID NO: 36758 - DNA, 20 bp, Artificial Sequence
  Synthetic
cccaaagccgcgcgagcagt

SEQ ID NO: 36759 - DNA, 20 bp, Artificial Sequence
  Synthetic
tcccactgctcgcgcggctt

SEQ ID NO: 36760 - DNA, 20 bp, Artificial Sequence
  Synthetic
aaagccgcgcgagcagtggg

SEQ ID NO: 36761 - DNA, 20 bp, Artificial Sequence
  Synthetic
tgctcctcccactgctcgcg

SEQ ID NO: 36762 - DNA, 20 bp, Artificial Sequence
  Synthetic
gcagtgggaggagcaatgag

SEQ ID NO: 36763 - DNA, 20 bp, Artificial Sequence
  Synthetic
acgggatgaggatggggacc

SEQ ID NO: 36764 - DNA, 20 bp, Artificial Sequence
  Synthetic
tgtggcacgggatgaggatg

SEQ ID NO: 36765 - DNA, 20 bp, Artificial Sequence
  Synthetic
ctgtggcacgggatgaggat

SEQ ID NO: 36766 - DNA, 20 bp, Artificial Sequence
  Synthetic
tctgtggcacgggatgagga

SEQ ID NO: 36767 - DNA, 20 bp, Artificial Sequence
  Synthetic
ccactctgtggcacgggatg

SEQ ID NO: 36768 - DNA, 20 bp, Artificial Sequence
  Synthetic
cctcatcccgtgccacagag

SEQ ID NO: 36769 - DNA, 20 bp, Artificial Sequence
  Synthetic
tgcagaccactctgtggcac

SEQ ID NO: 36770 - DNA, 20 bp, Artificial Sequence
  Synthetic
ctgcagaccactctgtggca

SEQ ID NO: 36771 - DNA, 20 bp, Artificial Sequence
  Synthetic
cgctgctgcagaccactctg

SEQ ID NO: 36772 - DNA, 20 bp, Artificial Sequence
  Synthetic
cacagagtggtctgcagcag

SEQ ID NO: 36773 - DNA, 20 bp, Artificial Sequence
  Synthetic
ggtctgcagcagcggagccg

SEQ ID NO: 36774 - DNA, 20 bp, Artificial Sequence
  Synthetic
gtctgcagcagcggagccgt

SEQ ID NO: 36775 - DNA, 20 bp, Artificial Sequence
  Synthetic
ggagccgtgggcaactactc

SEQ ID NO: 36776 - DNA, 20 bp, Artificial Sequence
  Synthetic
gccgtgggcaactactccgg

SEQ ID NO: 36777 - DNA, 20 bp, Artificial Sequence
  Synthetic
tcctccggagtagttgccca

SEQ ID NO: 36778 - DNA, 20 bp, Artificial Sequence
  Synthetic
gggcaactactccggaggac

SEQ ID NO: 36779 - DNA, 20 bp, Artificial Sequence
  Synthetic
ctccggaggactggccgtga

SEQ ID NO: 36780 - DNA, 20 bp, Artificial Sequence
  Synthetic
ttccttcacggccagtcctc

SEQ ID NO: 36781 - DNA, 20 bp, Artificial Sequence
  Synthetic
gaggactggccgtgaaggaa

SEQ ID NO: 36782 - DNA, 20 bp, Artificial Sequence
  Synthetic
ggccgtgaaggaatggcttc

SEQ ID NO: 36783 - DNA, 20 bp, Artificial Sequence
  Synthetic
ggccagaagccattccttca

SEQ ID NO: 36784 - DNA, 20 bp, Artificial Sequence
  Synthetic
gaatggcttctggcccatga

SEQ ID NO: 36785 - DNA, 20 bp, Artificial Sequence
  Synthetic
ttctggcccatgaaggccac

SEQ ID NO: 36786 - DNA, 20 bp, Artificial Sequence
  Synthetic
ggcccatgaaggccaccggt

SEQ ID NO: 36787 - DNA, 20 bp, Artificial Sequence
  Synthetic
gcccatgaaggccaccggtt

SEQ ID NO: 36788 - DNA, 20 bp, Artificial Sequence
  Synthetic
ccccaaccggtggccttcat

SEQ ID NO: 36789 - DNA, 20 bp, Artificial Sequence
  Synthetic
tccccaaccggtggccttca

SEQ ID NO: 36790 - DNA, 20 bp, Artificial Sequence
  Synthetic
agcctggcttccccaaccgg

SEQ ID NO: 36791 - DNA, 20 bp, Artificial Sequence
  Synthetic
tgaaatgaaacgcaccacac

SEQ ID NO: 36792 - DNA, 20 bp, Artificial Sequence
  Synthetic
caccacactggacagccctt

SEQ ID NO: 36793 - DNA, 20 bp, Artificial Sequence
  Synthetic
accacactggacagcccttt

SEQ ID NO: 36794 - DNA, 20 bp, Artificial Sequence
  Synthetic
ccccaaagggctgtccagtg

SEQ ID NO: 36795 - DNA, 20 bp, Artificial Sequence
  Synthetic
ccacactggacagccctttg

SEQ ID NO: 36796 - DNA, 20 bp, Artificial Sequence
  Synthetic
ggacagccctttggggaagc

SEQ ID NO: 36797 - DNA, 20 bp, Artificial Sequence
  Synthetic
acagctccagcttccccaaa

SEQ ID NO: 36798 - DNA, 20 bp, Artificial Sequence
  Synthetic
gacagctccagcttccccaa

SEQ ID NO: 36799 - DNA, 20 bp, Artificial Sequence
  Synthetic
ttggggaagctggagctgtc

SEQ ID NO: 36800 - DNA, 20 bp, Artificial Sequence
  Synthetic
ggagctgtctggttgtgagc

SEQ ID NO: 36801 - DNA, 20 bp, Artificial Sequence
  Synthetic
gagctgtctggttgtgagca

SEQ ID NO: 36802 - DNA, 20 bp, Artificial Sequence
  Synthetic
tctgcacgaaataaagctcc

SEQ ID NO: 36803 - DNA, 20 bp, Artificial Sequence
  Synthetic
ctgcacgaaataaagctcct

SEQ ID NO: 36804 - DNA, 20 bp, Artificial Sequence
  Synthetic
cgaaataaagctcctgggca

SEQ ID NO: 36805 - DNA, 20 bp, Artificial Sequence
  Synthetic
gaaataaagctcctgggcaa

SEQ ID NO: 36806 - DNA, 20 bp, Artificial Sequence
  Synthetic
aaataaagctcctgggcaag

SEQ ID NO: 36807 - DNA, 20 bp, Artificial Sequence
  Synthetic
ctgcagacgtccccttgccc

SEQ ID NO: 36808 - DNA, 20 bp, Artificial Sequence
  Synthetic
ttctcacttttgcagtgccg

SEQ ID NO: 36809 - DNA, 20 bp, Artificial Sequence
  Synthetic
tcacttttgcagtgccgtgg

SEQ ID NO: 36810 - DNA, 20 bp, Artificial Sequence
  Synthetic
agcgggggctgggacctcca

SEQ ID NO: 36811 - DNA, 20 bp, Artificial Sequence
  Synthetic
ggaggtcccagcccccgctg

SEQ ID NO: 36812 - DNA, 20 bp, Artificial Sequence
  Synthetic
cgagaaccgcagcgggggct

SEQ ID NO: 36813 - DNA, 20 bp, Artificial Sequence
  Synthetic
ccgagaaccgcagcgggggc

SEQ ID NO: 36814 - DNA, 20 bp, Artificial Sequence
  Synthetic
ccagcccccgctgcggttct

SEQ ID NO: 36815 - DNA, 20 bp, Artificial Sequence
  Synthetic
gcccccgctgcggttctcgg

SEQ ID NO: 36816 - DNA, 20 bp, Artificial Sequence
  Synthetic
acctccgagaaccgcagcgg

SEQ ID NO: 36817 - DNA, 20 bp, Artificial Sequence
  Synthetic
gacctccgagaaccgcagcg

SEQ ID NO: 36818 - DNA, 20 bp, Artificial Sequence
  Synthetic
ggacctccgagaaccgcagc

SEQ ID NO: 36819 - DNA, 20 bp, Artificial Sequence
  Synthetic
cggacctccgagaaccgcag

SEQ ID NO: 36820 - DNA, 20 bp, Artificial Sequence
  Synthetic
cgctgcggttctcggaggtc

SEQ ID NO: 36821 - DNA, 20 bp, Artificial Sequence
  Synthetic
gtgcactgcatcaggggctc

SEQ ID NO: 36822 - DNA, 20 bp, Artificial Sequence
  Synthetic
caggctgtgcactgcatcag

SEQ ID NO: 36823 - DNA, 20 bp, Artificial Sequence
  Synthetic
ccaggctgtgcactgcatca

SEQ ID NO: 36824 - DNA, 20 bp, Artificial Sequence
  Synthetic
ccctgatgcagtgcacagcc

SEQ ID NO: 36825 - DNA, 20 bp, Artificial Sequence
  Synthetic
gccaggctgtgcactgcatc

SEQ ID NO: 36826 - DNA, 20 bp, Artificial Sequence
  Synthetic
gtggaaataggcattcagcc

SEQ ID NO: 36827 - DNA, 20 bp, Artificial Sequence
  Synthetic
tgcctatttccaccagcccg

SEQ ID NO: 36828 - DNA, 20 bp, Artificial Sequence
  Synthetic
agcctcgggctggtggaaat

SEQ ID NO: 36829 - DNA, 20 bp, Artificial Sequence
  Synthetic
cttcgatagcctcgggctgg

SEQ ID NO: 36830 - DNA, 20 bp, Artificial Sequence
  Synthetic
actcttcgatagcctcgggc

SEQ ID NO: 36831 - DNA, 20 bp, Artificial Sequence
  Synthetic
gggaactcttcgatagcctc

SEQ ID NO: 36832 - DNA, 20 bp, Artificial Sequence
  Synthetic
ggggaactcttcgatagcct

SEQ ID NO: 36833 - DNA, 20 bp, Artificial Sequence
  Synthetic
tatcgaagagttccccgtgc

SEQ ID NO: 36834 - DNA, 20 bp, Artificial Sequence
  Synthetic
gatggtgaagagccggcacg

SEQ ID NO: 36835 - DNA, 20 bp, Artificial Sequence
  Synthetic
ggatggtgaagagccggcac

SEQ ID NO: 36836 - DNA, 20 bp, Artificial Sequence
  Synthetic
gggatggtgaagagccggca

SEQ ID NO: 36837 - DNA, 20 bp, Artificial Sequence
  Synthetic
aaaacgggatggtgaagagc

SEQ ID NO: 36838 - DNA, 20 bp, Artificial Sequence
  Synthetic
caccatcccgttttccagca

SEQ ID NO: 36839 - DNA, 20 bp, Artificial Sequence
  Synthetic
gaccttgctggaaaacggga

SEQ ID NO: 36840 - DNA, 20 bp, Artificial Sequence
  Synthetic
taccgaccttgctggaaaac

SEQ ID NO: 36841 - DNA, 20 bp, Artificial Sequence
  Synthetic
ttaccgaccttgctggaaaa

SEQ ID NO: 36842 - DNA, 20 bp, Artificial Sequence
  Synthetic
cccgaagcctaaattccagg

SEQ ID NO: 36843 - DNA, 20 bp, Artificial Sequence
  Synthetic
ccgaagcctaaattccagga

SEQ ID NO: 36844 - DNA, 20 bp, Artificial Sequence
  Synthetic
aaggcgcacactcaccctcc

SEQ ID NO: 36845 - DNA, 20 bp, Artificial Sequence
  Synthetic
gagcgagtgctgtgctttca

SEQ ID NO: 36846 - DNA, 20 bp, Artificial Sequence
  Synthetic
agcgagtgctgtgctttcat

SEQ ID NO: 36847 - DNA, 20 bp, Artificial Sequence
  Synthetic
gcctcttctttatgaagcaa

SEQ ID NO: 36848 - DNA, 20 bp, Artificial Sequence
  Synthetic
acctttgcttcataaagaag

SEQ ID NO: 36849 - DNA, 20 bp, Artificial Sequence
  Synthetic
ttttgaatttcagtgtgtaa

SEQ ID NO: 36850 - DNA, 20 bp, Artificial Sequence
  Synthetic
gtgtgtaaaggttgccataa

SEQ ID NO: 36851 - DNA, 20 bp, Artificial Sequence
  Synthetic
tttcacttgtttgtccttta

SEQ ID NO: 36852 - DNA, 20 bp, Artificial Sequence
  Synthetic
aaatacttcatacattacag

SEQ ID NO: 36853 - DNA, 20 bp, Artificial Sequence
  Synthetic
acttcatacattacagtggt

SEQ ID NO: 36854 - DNA, 20 bp, Artificial Sequence
  Synthetic
tctttttcagttgggatgaa

SEQ ID NO: 36855 - DNA, 20 bp, Artificial Sequence
  Synthetic
ctttttcagttgggatgaat

SEQ ID NO: 36856 - DNA, 20 bp, Artificial Sequence
  Synthetic
cagttgggatgaatgggttc

SEQ ID NO: 36857 - DNA, 20 bp, Artificial Sequence
  Synthetic
tatttgagtactctgctctc

SEQ ID NO: 36858 - DNA, 20 bp, Artificial Sequence
  Synthetic
tgaaatttaaattccactca

SEQ ID NO: 36859 - DNA, 20 bp, Artificial Sequence
  Synthetic
gaaatttaaattccactcag

SEQ ID NO: 36860 - DNA, 20 bp, Artificial Sequence
  Synthetic
acagcactttctcccctgag

SEQ ID NO: 36861 - DNA, 20 bp, Artificial Sequence
  Synthetic
cttcgagcctgaccccacca

SEQ ID NO: 36862 - DNA, 20 bp, Artificial Sequence
  Synthetic
actcgcgccttggtggggtc

SEQ ID NO: 36863 - DNA, 20 bp, Artificial Sequence
  Synthetic
acagcactcgcgccttggtg

SEQ ID NO: 36864 - DNA, 20 bp, Artificial Sequence
  Synthetic
tacagcactcgcgccttggt

SEQ ID NO: 36865 - DNA, 20 bp, Artificial Sequence
  Synthetic
gtacagcactcgcgccttgg

SEQ ID NO: 36866 - DNA, 20 bp, Artificial Sequence
  Synthetic
atcgtacagcactcgcgcct

SEQ ID NO: 36867 - DNA, 20 bp, Artificial Sequence
  Synthetic
gcgagtgctgtacgatgcca

SEQ ID NO: 36868 - DNA, 20 bp, Artificial Sequence
  Synthetic
cagattgttgatgttattgt

SEQ ID NO: 36869 - DNA, 20 bp, Artificial Sequence
  Synthetic
agattgttgatgttattgtt

SEQ ID NO: 36870 - DNA, 20 bp, Artificial Sequence
  Synthetic
attgttgggaaagacgaaaa

SEQ ID NO: 36871 - DNA, 20 bp, Artificial Sequence
  Synthetic
taaaatggatcagatattct

SEQ ID NO: 36872 - DNA, 20 bp, Artificial Sequence
  Synthetic
ttaaaatggatcagatattc

SEQ ID NO: 36873 - DNA, 20 bp, Artificial Sequence
  Synthetic
gaatatctgatccattttaa

SEQ ID NO: 36874 - DNA, 20 bp, Artificial Sequence
  Synthetic
atctgatccattttaatggt

SEQ ID NO: 36875 - DNA, 20 bp, Artificial Sequence
  Synthetic
ttctgttccaaccattaaaa

SEQ ID NO: 36876 - DNA, 20 bp, Artificial Sequence
  Synthetic
attttaatggttggaacaga

SEQ ID NO: 36877 - DNA, 20 bp, Artificial Sequence
  Synthetic
gttcaattagctgggataga

SEQ ID NO: 36878 - DNA, 20 bp, Artificial Sequence
  Synthetic
ttcaattagctgggatagat

SEQ ID NO: 36879 - DNA, 20 bp, Artificial Sequence
  Synthetic
acatggccgccaacatgtac

SEQ ID NO: 36880 - DNA, 20 bp, Artificial Sequence
  Synthetic
catggccgccaacatgtaca

SEQ ID NO: 36881 - DNA, 20 bp, Artificial Sequence
  Synthetic
gccgccaacatgtacagggt

SEQ ID NO: 36882 - DNA, 20 bp, Artificial Sequence
  Synthetic
tccgaccctgtacatgttgg

SEQ ID NO: 36883 - DNA, 20 bp, Artificial Sequence
  Synthetic
gccaacatgtacagggtcgg

SEQ ID NO: 36884 - DNA, 20 bp, Artificial Sequence
  Synthetic
acctccgaccctgtacatgt

SEQ ID NO: 36885 - DNA, 20 bp, Artificial Sequence
  Synthetic
gatcaggtatgggttgctgg

SEQ ID NO: 36886 - DNA, 20 bp, Artificial Sequence
  Synthetic
ccggatcaggtatgggttgc

SEQ ID NO: 36887 - DNA, 20 bp, Artificial Sequence
  Synthetic
ccagcaacccatacctgatc

SEQ ID NO: 36888 - DNA, 20 bp, Artificial Sequence
  Synthetic
cgattctccggatcaggtat

SEQ ID NO: 36889 - DNA, 20 bp, Artificial Sequence
  Synthetic
tcgattctccggatcaggta

SEQ ID NO: 36890 - DNA, 20 bp, Artificial Sequence
  Synthetic
atacctgatccggagaatcg

SEQ ID NO: 36891 - DNA, 20 bp, Artificial Sequence
  Synthetic
gctcctcgattctccggatc

SEQ ID NO: 36892 - DNA, 20 bp, Artificial Sequence
  Synthetic
tgttgagctcctcgattctc

SEQ ID NO: 36893 - DNA, 20 bp, Artificial Sequence
  Synthetic
gagaatcgaggagctcaaca

SEQ ID NO: 36894 - DNA, 20 bp, Artificial Sequence
  Synthetic
ttgctgttacagacggccaa

SEQ ID NO: 36895 - DNA, 20 bp, Artificial Sequence
  Synthetic
tgctgttacagacggccaat

SEQ ID NO: 36896 - DNA, 20 bp, Artificial Sequence
  Synthetic
acagacggccaatgggaacg

SEQ ID NO: 36897 - DNA, 20 bp, Artificial Sequence
  Synthetic
gacggccaatgggaacgtgg

SEQ ID NO: 36898 - DNA, 20 bp, Artificial Sequence
  Synthetic
tttggcctccacgttcccat

SEQ ID NO: 36899 - DNA, 20 bp, Artificial Sequence
  Synthetic
tgggaacgtggaggccaaag

SEQ ID NO: 36900 - DNA, 20 bp, Artificial Sequence
  Synthetic
ccggtagaagcacaccactt

SEQ ID NO: 36901 - DNA, 20 bp, Artificial Sequence
  Synthetic
ccaaagtggtgtgcttctac

SEQ ID NO: 36902 - DNA, 20 bp, Artificial Sequence
  Synthetic
aagtggtgtgcttctaccgg

SEQ ID NO: 36903 - DNA, 20 bp, Artificial Sequence
  Synthetic
tggtgtgcttctaccggagg

SEQ ID NO: 36904 - DNA, 20 bp, Artificial Sequence
  Synthetic
ggtgtgcttctaccggaggc

SEQ ID NO: 36905 - DNA, 20 bp, Artificial Sequence
  Synthetic
tgctggagatgtcccgcctc

SEQ ID NO: 36906 - DNA, 20 bp, Artificial Sequence
  Synthetic
ctccagcaccctcatcgccc

SEQ ID NO: 36907 - DNA, 20 bp, Artificial Sequence
  Synthetic
ggccagggcgatgagggtgc

SEQ ID NO: 36908 - DNA, 20 bp, Artificial Sequence
  Synthetic
cttgtcggccagggcgatga

SEQ ID NO: 36909 - DNA, 20 bp, Artificial Sequence
  Synthetic
gcttgtcggccagggcgatg

SEQ ID NO: 36910 - DNA, 20 bp, Artificial Sequence
  Synthetic
acttgcgtgcttgtcggcca

SEQ ID NO: 36911 - DNA, 20 bp, Artificial Sequence
  Synthetic
cacttgcgtgcttgtcggcc

SEQ ID NO: 36912 - DNA, 20 bp, Artificial Sequence
  Synthetic
ggactcacttgcgtgcttgt

SEQ ID NO: 36913 - DNA, 20 bp, Artificial Sequence
  Synthetic
agccctgtcagtctgctata

SEQ ID NO: 36914 - DNA, 20 bp, Artificial Sequence
  Synthetic
ggccttatagcagactgaca

SEQ ID NO: 36915 - DNA, 20 bp, Artificial Sequence
  Synthetic
cggccttatagcagactgac

SEQ ID NO: 36916 - DNA, 20 bp, Artificial Sequence
  Synthetic
ctgtcagtctgctataaggc

SEQ ID NO: 36917 - DNA, 20 bp, Artificial Sequence
  Synthetic
agtctgctataaggccggac

SEQ ID NO: 36918 - DNA, 20 bp, Artificial Sequence
  Synthetic
gtctgctataaggccggacc

SEQ ID NO: 36919 - DNA, 20 bp, Artificial Sequence
  Synthetic
tctgctataaggccggaccg

SEQ ID NO: 36920 - DNA, 20 bp, Artificial Sequence
  Synthetic
ctgctataaggccggaccgg

SEQ ID NO: 36921 - DNA, 20 bp, Artificial Sequence
  Synthetic
ctataaggccggaccggggg

SEQ ID NO: 36922 - DNA, 20 bp, Artificial Sequence
  Synthetic
gccggaccgggggcggacaa

SEQ ID NO: 36923 - DNA, 20 bp, Artificial Sequence
  Synthetic
gccgttgtccgcccccggtc

SEQ ID NO: 36924 - DNA, 20 bp, Artificial Sequence
  Synthetic
accgggggcggacaacggcg

SEQ ID NO: 36925 - DNA, 20 bp, Artificial Sequence
  Synthetic
tcctcgccgttgtccgcccc

SEQ ID NO: 36926 - DNA, 20 bp, Artificial Sequence
  Synthetic
ggggcggacaacggcgagga

SEQ ID NO: 36927 - DNA, 20 bp, Artificial Sequence
  Synthetic
tccttcaggggaaatagaag

SEQ ID NO: 36928 - DNA, 20 bp, Artificial Sequence
  Synthetic
aggggaaatagaagaggaaa

SEQ ID NO: 36929 - DNA, 20 bp, Artificial Sequence
  Synthetic
agaagaggaaatggagaacc

SEQ ID NO: 36930 - DNA, 20 bp, Artificial Sequence
  Synthetic
ggaaatggagaacccggaaa

SEQ ID NO: 36931 - DNA, 20 bp, Artificial Sequence
  Synthetic
aatggagaacccggaaatgg

SEQ ID NO: 36932 - DNA, 20 bp, Artificial Sequence
  Synthetic
cgggcaggtccaccatttcc

SEQ ID NO: 36933 - DNA, 20 bp, Artificial Sequence
  Synthetic
tcgggcaggtccaccatttc

SEQ ID NO: 36934 - DNA, 20 bp, Artificial Sequence
  Synthetic
ggtgctttagtttctcgggc

SEQ ID NO: 36935 - DNA, 20 bp, Artificial Sequence
  Synthetic
agctggtgctttagtttctc

SEQ ID NO: 36936 - DNA, 20 bp, Artificial Sequence
  Synthetic
cagctggtgctttagtttct

SEQ ID NO: 36937 - DNA, 20 bp, Artificial Sequence
  Synthetic
agaaactaaagcaccagctg

SEQ ID NO: 36938 - DNA, 20 bp, Artificial Sequence
  Synthetic
taaagcaccagctgcggcat

SEQ ID NO: 36939 - DNA, 20 bp, Artificial Sequence
  Synthetic
aaagcaccagctgcggcatc

SEQ ID NO: 36940 - DNA, 20 bp, Artificial Sequence
  Synthetic
acagctcccgatgccgcagc

SEQ ID NO: 36941 - DNA, 20 bp, Artificial Sequence
  Synthetic
atcgggagctgttcctctcc

SEQ ID NO: 36942 - DNA, 20 bp, Artificial Sequence
  Synthetic
gctgttcctctcccggcagc

SEQ ID NO: 36943 - DNA, 20 bp, Artificial Sequence
  Synthetic
gagactccagctgccgggag

SEQ ID NO: 36944 - DNA, 20 bp, Artificial Sequence
  Synthetic
gggcagagactccagctgcc

SEQ ID NO: 36945 - DNA, 20 bp, Artificial Sequence
  Synthetic
cgggcagagactccagctgc

SEQ ID NO: 36946 - DNA, 20 bp, Artificial Sequence
  Synthetic
ctctgcccgccacgcacatc

SEQ ID NO: 36947 - DNA, 20 bp, Artificial Sequence
  Synthetic
ggctacctgatgtgcgtggc

SEQ ID NO: 36948 - DNA, 20 bp, Artificial Sequence
  Synthetic
gggctacctgatgtgcgtgg

SEQ ID NO: 36949 - DNA, 20 bp, Artificial Sequence
  Synthetic
tgggggctacctgatgtgcg

SEQ ID NO: 36950 - DNA, 20 bp, Artificial Sequence
  Synthetic
ggtgacgctgcacttgcccc

SEQ ID NO: 36951 - DNA, 20 bp, Artificial Sequence
  Synthetic
cgactcggtctcgttgagca

SEQ ID NO: 36952 - DNA, 20 bp, Artificial Sequence
  Synthetic
gcgactcggtctcgttgagc

SEQ ID NO: 36953 - DNA, 20 bp, Artificial Sequence
  Synthetic
caggtaggacttgagcgact

SEQ ID NO: 36954 - DNA, 20 bp, Artificial Sequence
  Synthetic
cgagtcgctcaagtcctacc

SEQ ID NO: 36955 - DNA, 20 bp, Artificial Sequence
  Synthetic
cgctcaagtcctacctggag

SEQ ID NO: 36956 - DNA, 20 bp, Artificial Sequence
  Synthetic
gctcaagtcctacctggagc

SEQ ID NO: 36957 - DNA, 20 bp, Artificial Sequence
  Synthetic
caagtcctacctggagcggg

SEQ ID NO: 36958 - DNA, 20 bp, Artificial Sequence
  Synthetic
cctcacctcccgctccaggt

SEQ ID NO: 36959 - DNA, 20 bp, Artificial Sequence
  Synthetic
tgggcctcacctcccgctcc

SEQ ID NO: 36960 - DNA, 20 bp, Artificial Sequence
  Synthetic
gagaatagaagaagaaatcc

SEQ ID NO: 36961 - DNA, 20 bp, Artificial Sequence
  Synthetic
ccagcagggtcttctgctgt

SEQ ID NO: 36962 - DNA, 20 bp, Artificial Sequence
  Synthetic
cccacagcagaagaccctgc

SEQ ID NO: 36963 - DNA, 20 bp, Artificial Sequence
  Synthetic
gccagcagggtcttctgctg

SEQ ID NO: 36964 - DNA, 20 bp, Artificial Sequence
  Synthetic
aagaccctgctggcagataa

SEQ ID NO: 36965 - DNA, 20 bp, Artificial Sequence
  Synthetic
ctctcctttatctgccagca

SEQ ID NO: 36966 - DNA, 20 bp, Artificial Sequence
  Synthetic
tctctcctttatctgccagc

SEQ ID NO: 36967 - DNA, 20 bp, Artificial Sequence
  Synthetic
ccatggcggccaacatgtac

SEQ ID NO: 36968 - DNA, 20 bp, Artificial Sequence
  Synthetic
catggcggccaacatgtacc

SEQ ID NO: 36969 - DNA, 20 bp, Artificial Sequence
  Synthetic
ggcggccaacatgtaccggg

SEQ ID NO: 36970 - DNA, 20 bp, Artificial Sequence
  Synthetic
gcggccaacatgtaccgggt

SEQ ID NO: 36971 - DNA, 20 bp, Artificial Sequence
  Synthetic
gccaacatgtaccgggtggg

SEQ ID NO: 36972 - DNA, 20 bp, Artificial Sequence
  Synthetic
acctcccacccggtacatgt

SEQ ID NO: 36973 - DNA, 20 bp, Artificial Sequence
  Synthetic
cccggtactcacctcccacc

SEQ ID NO: 36974 - DNA, 20 bp, Artificial Sequence
  Synthetic
ctcttccagcaatccttacc

SEQ ID NO: 36975 - DNA, 20 bp, Artificial Sequence
  Synthetic
tctaaccaggtaaggattgc

SEQ ID NO: 36976 - DNA, 20 bp, Artificial Sequence
  Synthetic
gcaatccttacctggttaga

SEQ ID NO: 36977 - DNA, 20 bp, Artificial Sequence
  Synthetic
tcaatccgtctaaccaggta

SEQ ID NO: 36978 - DNA, 20 bp, Artificial Sequence
  Synthetic
ttacctggttagacggattg

SEQ ID NO: 36979 - DNA, 20 bp, Artificial Sequence
  Synthetic
gctcctcaatccgtctaacc

SEQ ID NO: 36980 - DNA, 20 bp, Artificial Sequence
  Synthetic
acggattgaggagctcaaca

SEQ ID NO: 36981 - DNA, 20 bp, Artificial Sequence
  Synthetic
tcctccccttagactgcaaa

SEQ ID NO: 36982 - DNA, 20 bp, Artificial Sequence
  Synthetic
ttagactgcaaatggaaatg

SEQ ID NO: 36983 - DNA, 20 bp, Artificial Sequence
  Synthetic
gactgcaaatggaaatgtgg

SEQ ID NO: 36984 - DNA, 20 bp, Artificial Sequence
  Synthetic
aaatggaaatgtggaggcaa

SEQ ID NO: 36985 - DNA, 20 bp, Artificial Sequence
  Synthetic
caaaggttgtctgtcttttc

SEQ ID NO: 36986 - DNA, 20 bp, Artificial Sequence
  Synthetic
ttgtctgtcttttccggcgc

SEQ ID NO: 36987 - DNA, 20 bp, Artificial Sequence
  Synthetic
tgtctgtcttttccggcgca

SEQ ID NO: 36988 - DNA, 20 bp, Artificial Sequence
  Synthetic
tactagaaatgtccctgcgc

SEQ ID NO: 36989 - DNA, 20 bp, Artificial Sequence
  Synthetic
ttctagtagcctcaacagcc

SEQ ID NO: 36990 - DNA, 20 bp, Artificial Sequence
  Synthetic
tactatcagccaggctgttg

SEQ ID NO: 36991 - DNA, 20 bp, Artificial Sequence
  Synthetic
cactggcattactatcagcc

SEQ ID NO: 36992 - DNA, 20 bp, Artificial Sequence
  Synthetic
tctcccaggggagtttgaag

SEQ ID NO: 36993 - DNA, 20 bp, Artificial Sequence
  Synthetic
gattcctcttcaaactcccc

SEQ ID NO: 36994 - DNA, 20 bp, Artificial Sequence
  Synthetic
gaagaggaatcaaagcagcc

SEQ ID NO: 36995 - DNA, 20 bp, Artificial Sequence
  Synthetic
aagaggaatcaaagcagcca

SEQ ID NO: 36996 - DNA, 20 bp, Artificial Sequence
  Synthetic
agaggaatcaaagcagccag

SEQ ID NO: 36997 - DNA, 20 bp, Artificial Sequence
  Synthetic
cgctgctgctcagacacccc

SEQ ID NO: 36998 - DNA, 20 bp, Artificial Sequence
  Synthetic
agcgccatcaactgaagcac

SEQ ID NO: 36999 - DNA, 20 bp, Artificial Sequence
  Synthetic
gcgccatcaactgaagcacc

SEQ ID NO: 37000 - DNA, 20 bp, Artificial Sequence
  Synthetic
gttcccggtgcttcagttga

SEQ ID NO: 37001 - DNA, 20 bp, Artificial Sequence
  Synthetic
accgggaactttttctttct

SEQ ID NO: 37002 - DNA, 20 bp, Artificial Sequence
  Synthetic
gccgagaaagaaaaagttcc

SEQ ID NO: 37003 - DNA, 20 bp, Artificial Sequence
  Synthetic
cattaccagccacccacata

SEQ ID NO: 37004 - DNA, 20 bp, Artificial Sequence
  Synthetic
ctgtaccgtatgtgggtggc

SEQ ID NO: 37005 - DNA, 20 bp, Artificial Sequence
  Synthetic
tgtcctgtaccgtatgtggg

SEQ ID NO: 37006 - DNA, 20 bp, Artificial Sequence
  Synthetic
agttgtcctgtaccgtatgt

SEQ ID NO: 37007 - DNA, 20 bp, Artificial Sequence
  Synthetic
cagttgtcctgtaccgtatg

SEQ ID NO: 37008 - DNA, 20 bp, Artificial Sequence
  Synthetic
gatatctgtctcattcaaga

SEQ ID NO: 37009 - DNA, 20 bp, Artificial Sequence
  Synthetic
agatatctgtctcattcaag

SEQ ID NO: 37010 - DNA, 20 bp, Artificial Sequence
  Synthetic
agatatcttgagccagtacc

SEQ ID NO: 37011 - DNA, 20 bp, Artificial Sequence
  Synthetic
cttgagccagtacctggaaa

SEQ ID NO: 37012 - DNA, 20 bp, Artificial Sequence
  Synthetic
gagccagtacctggaaaagg

SEQ ID NO: 37013 - DNA, 20 bp, Artificial Sequence
  Synthetic
tcacctccttttccaggtac

SEQ ID NO: 37014 - DNA, 20 bp, Artificial Sequence
  Synthetic
tctttctcacctccttttcc

SEQ ID NO: 37015 - DNA, 20 bp, Artificial Sequence
  Synthetic
gtgagtaaaaaaagcagtcc

SEQ ID NO: 37016 - DNA, 20 bp, Artificial Sequence
  Synthetic
ggactgctttttttactcac

SEQ ID NO: 37017 - DNA, 20 bp, Artificial Sequence
  Synthetic
cgagaagtgtcttctgcacg

SEQ ID NO: 37018 - DNA, 20 bp, Artificial Sequence
  Synthetic
gcgagaagtgtcttctgcac

SEQ ID NO: 37019 - DNA, 20 bp, Artificial Sequence
  Synthetic
agcgagaagtgtcttctgca

SEQ ID NO: 37020 - DNA, 20 bp, Artificial Sequence
  Synthetic
gaagacacttctcgctgatc

SEQ ID NO: 37021 - DNA, 20 bp, Artificial Sequence
  Synthetic
aagacacttctcgctgatca

SEQ ID NO: 37022 - DNA, 20 bp, Artificial Sequence
  Synthetic
acatggcggccaacatgtac

SEQ ID NO: 37023 - DNA, 20 bp, Artificial Sequence
  Synthetic
catggcggccaacatgtacc

SEQ ID NO: 37024 - DNA, 20 bp, Artificial Sequence
  Synthetic
gcggccaacatgtaccgggt

SEQ ID NO: 37025 - DNA, 20 bp, Artificial Sequence
  Synthetic
gccaacatgtaccgggtcgg

SEQ ID NO: 37026 - DNA, 20 bp, Artificial Sequence
  Synthetic
acctccgacccggtacatgt

SEQ ID NO: 37027 - DNA, 20 bp, Artificial Sequence
  Synthetic
acatgtaccgggtcggaggt

SEQ ID NO: 37028 - DNA, 20 bp, Artificial Sequence
  Synthetic
gagcctgcctacctccgacc

SEQ ID NO: 37029 - DNA, 20 bp, Artificial Sequence
  Synthetic
tattaggtatgggttgctgg

SEQ ID NO: 37030 - DNA, 20 bp, Artificial Sequence
  Synthetic
tcttattaggtatgggttgc

SEQ ID NO: 37031 - DNA, 20 bp, Artificial Sequence
  Synthetic
gcaacccatacctaataaga

SEQ ID NO: 37032 - DNA, 20 bp, Artificial Sequence
  Synthetic
ctatccttcttattaggtat

SEQ ID NO: 37033 - DNA, 20 bp, Artificial Sequence
  Synthetic
tctatccttcttattaggta

SEQ ID NO: 37034 - DNA, 20 bp, Artificial Sequence
  Synthetic
gttcttctatccttcttatt

SEQ ID NO: 37035 - DNA, 20 bp, Artificial Sequence
  Synthetic
aaggatagaagaactcaaca

SEQ ID NO: 37036 - DNA, 20 bp, Artificial Sequence
  Synthetic
cttatctcttagactgcaag

SEQ ID NO: 37037 - DNA, 20 bp, Artificial Sequence
  Synthetic
ttagactgcaagtggcaacg

SEQ ID NO: 37038 - DNA, 20 bp, Artificial Sequence
  Synthetic
tgcgagcattataagtgtgt

SEQ ID NO: 37039 - DNA, 20 bp, Artificial Sequence
  Synthetic
tatttgtgtagaagaaattg

SEQ ID NO: 37040 - DNA, 20 bp, Artificial Sequence
  Synthetic
agaatctgaaacaacagttg

SEQ ID NO: 37041 - DNA, 20 bp, Artificial Sequence
  Synthetic
caactgatgtttctgcttat

SEQ ID NO: 37042 - DNA, 20 bp, Artificial Sequence
  Synthetic
agaaacatcagttgaaacat

SEQ ID NO: 37043 - DNA, 20 bp, Artificial Sequence
  Synthetic
gaaacatcagttgaaacata

SEQ ID NO: 37044 - DNA, 20 bp, Artificial Sequence
  Synthetic
ttgcgggcagagattcatac

SEQ ID NO: 37045 - DNA, 20 bp, Artificial Sequence
  Synthetic
ctctgcccgcaacacatatc

SEQ ID NO: 37046 - DNA, 20 bp, Artificial Sequence
  Synthetic
tcttacctgatatgtgttgc

SEQ ID NO: 37047 - DNA, 20 bp, Artificial Sequence
  Synthetic
ttcttacctgatatgtgttg

SEQ ID NO: 37048 - DNA, 20 bp, Artificial Sequence
  Synthetic
tgattctgtctcattcagaa

SEQ ID NO: 37049 - DNA, 20 bp, Artificial Sequence
  Synthetic
ctgattctgtctcattcaga

SEQ ID NO: 37050 - DNA, 20 bp, Artificial Sequence
  Synthetic
agtattgtcatatcttgata

SEQ ID NO: 37051 - DNA, 20 bp, Artificial Sequence
  Synthetic
attgtcatatcttgataagg

SEQ ID NO: 37052 - DNA, 20 bp, Artificial Sequence
  Synthetic
ggataccttcttctactcat

SEQ ID NO: 37053 - DNA, 20 bp, Artificial Sequence
  Synthetic
atagaccaatgagtagaaga

SEQ ID NO: 37054 - DNA, 20 bp, Artificial Sequence
  Synthetic
ctaatagtgttttcaatgag

SEQ ID NO: 37055 - DNA, 20 bp, Artificial Sequence
  Synthetic
gctaatagtgttttcaatga

SEQ ID NO: 37056 - DNA, 20 bp, Artificial Sequence
  Synthetic
agctaatagtgttttcaatg

SEQ ID NO: 37057 - DNA, 20 bp, Artificial Sequence
  Synthetic
aaaacactattagctgacaa

SEQ ID NO: 37058 - DNA, 20 bp, Artificial Sequence
  Synthetic
ttcagaagctcccaatgaaa

SEQ ID NO: 37059 - DNA, 20 bp, Artificial Sequence
  Synthetic
tcacatataaccatttcatt

SEQ ID NO: 37060 - DNA, 20 bp, Artificial Sequence
  Synthetic
gtcacatataaccatttcat

SEQ ID NO: 37061 - DNA, 20 bp, Artificial Sequence
  Synthetic
atggttatatgtgacaagtg

SEQ ID NO: 37062 - DNA, 20 bp, Artificial Sequence
  Synthetic
atatgtgacaagtgtggcca

SEQ ID NO: 37063 - DNA, 20 bp, Artificial Sequence
  Synthetic
atcacactggaatcaatatg

SEQ ID NO: 37064 - DNA, 20 bp, Artificial Sequence
  Synthetic
ttcatctgaatcaatcacac

SEQ ID NO: 37065 - DNA, 20 bp, Artificial Sequence
  Synthetic
tgattgattcagatgaaaaa

SEQ ID NO: 37066 - DNA, 20 bp, Artificial Sequence
  Synthetic
cagatgaaaaatggctctgt

SEQ ID NO: 37067 - DNA, 20 bp, Artificial Sequence
  Synthetic
tccgcacattacagcggggt

SEQ ID NO: 37068 - DNA, 20 bp, Artificial Sequence
  Synthetic
ccgcacattacagcggggtt

SEQ ID NO: 37069 - DNA, 20 bp, Artificial Sequence
  Synthetic
cgcacattacagcggggttg

SEQ ID NO: 37070 - DNA, 20 bp, Artificial Sequence
  Synthetic
tacagcggggttggggtcta

SEQ ID NO: 37071 - DNA, 20 bp, Artificial Sequence
  Synthetic
gacaaaaacagatattaaaa

SEQ ID NO: 37072 - DNA, 20 bp, Artificial Sequence
  Synthetic
tgaatttgtgaatgagtatg

SEQ ID NO: 37073 - DNA, 20 bp, Artificial Sequence
  Synthetic
gaatttgtgaatgagtatgt

SEQ ID NO: 37074 - DNA, 20 bp, Artificial Sequence
  Synthetic
cccattacttactttgtcta

SEQ ID NO: 37075 - DNA, 20 bp, Artificial Sequence
  Synthetic
tcccattacttactttgtct

SEQ ID NO: 37076 - DNA, 20 bp, Artificial Sequence
  Synthetic
taggaccgaatcattgatgc

SEQ ID NO: 37077 - DNA, 20 bp, Artificial Sequence
  Synthetic
tgggaccagcatcaatgatt

SEQ ID NO: 37078 - DNA, 20 bp, Artificial Sequence
  Synthetic
atcattgatgctggtcccaa

SEQ ID NO: 37079 - DNA, 20 bp, Artificial Sequence
  Synthetic
gtcccaaaggaaactatgct

SEQ ID NO: 37080 - DNA, 20 bp, Artificial Sequence
  Synthetic
aaccgagcatagtttccttt

SEQ ID NO: 37081 - DNA, 20 bp, Artificial Sequence
  Synthetic
gaaccgagcatagtttcctt

SEQ ID NO: 37082 - DNA, 20 bp, Artificial Sequence
  Synthetic
tctgtgtttcacagttgggc

SEQ ID NO: 37083 - DNA, 20 bp, Artificial Sequence
  Synthetic
cacttctgtgtttcacagtt

SEQ ID NO: 37084 - DNA, 20 bp, Artificial Sequence
  Synthetic
ccacttctgtgtttcacagt

SEQ ID NO: 37085 - DNA, 20 bp, Artificial Sequence
  Synthetic
ccaactgtgaaacacagaag

SEQ ID NO: 37086 - DNA, 20 bp, Artificial Sequence
  Synthetic
acacagaagtggtctgtgaa

SEQ ID NO: 37087 - DNA, 20 bp, Artificial Sequence
  Synthetic
gtgaatggagatacccgtgt

SEQ ID NO: 37088 - DNA, 20 bp, Artificial Sequence
  Synthetic
tagtgcaaaaaggcctacac

SEQ ID NO: 37089 - DNA, 20 bp, Artificial Sequence
  Synthetic
ttagtgcaaaaaggcctaca

SEQ ID NO: 37090 - DNA, 20 bp, Artificial Sequence
  Synthetic
taatgtcacttagtgcaaaa

SEQ ID NO: 37091 - DNA, 20 bp, Artificial Sequence
  Synthetic
gcactaagtgacattaaagc

SEQ ID NO: 37092 - DNA, 20 bp, Artificial Sequence
  Synthetic
acattctaggttgtagttga

SEQ ID NO: 37093 - DNA, 20 bp, Artificial Sequence
  Synthetic
tggtgctttgtgtgctcaga

SEQ ID NO: 37094 - DNA, 20 bp, Artificial Sequence
  Synthetic
ggcaagaatcacagcacaga

SEQ ID NO: 37095 - DNA, 20 bp, Artificial Sequence
  Synthetic
attcacgatgaaaagcagca

SEQ ID NO: 37096 - DNA, 20 bp, Artificial Sequence
  Synthetic
cattcacgatgaaaagcagc

SEQ ID NO: 37097 - DNA, 20 bp, Artificial Sequence
  Synthetic
cttcagggatatcaatgttc

SEQ ID NO: 37098 - DNA, 20 bp, Artificial Sequence
  Synthetic
ctgaacattgatatccctga

SEQ ID NO: 37099 - DNA, 20 bp, Artificial Sequence
  Synthetic
ttgatatccctgaaggaaac

SEQ ID NO: 37100 - DNA, 20 bp, Artificial Sequence
  Synthetic
tgcaataccagtttccttca

SEQ ID NO: 37101 - DNA, 20 bp, Artificial Sequence
  Synthetic
ttgcaataccagtttccttc

SEQ ID NO: 37102 - DNA, 20 bp, Artificial Sequence
  Synthetic
tattgcaatgactgtaaagc

SEQ ID NO: 37103 - DNA, 20 bp, Artificial Sequence
  Synthetic
gttgtagctacaaatccatc

SEQ ID NO: 37104 - DNA, 20 bp, Artificial Sequence
  Synthetic
tcgctaatgagacgtcctga

SEQ ID NO: 37105 - DNA, 20 bp, Artificial Sequence
  Synthetic
tcagaaactgccttctaaag

SEQ ID NO: 37106 - DNA, 20 bp, Artificial Sequence
  Synthetic
gcatcacttaccactttaga

SEQ ID NO: 37107 - DNA, 20 bp, Artificial Sequence
  Synthetic
cataataatctggatattgc

SEQ ID NO: 37108 - DNA, 20 bp, Artificial Sequence
  Synthetic
ttaattattgcataataatc

SEQ ID NO: 37109 - DNA, 20 bp, Artificial Sequence
  Synthetic
agattattatgcaataatta

SEQ ID NO: 37110 - DNA, 20 bp, Artificial Sequence
  Synthetic
gcaatggtcttgagatctat

SEQ ID NO: 37111 - DNA, 20 bp, Artificial Sequence
  Synthetic
atctcaagaccattgcccag

SEQ ID NO: 37112 - DNA, 20 bp, Artificial Sequence
  Synthetic
gaccattgcccagaggatac

SEQ ID NO: 37113 - DNA, 20 bp, Artificial Sequence
  Synthetic
tacctgtatcctctgggcaa

SEQ ID NO: 37114 - DNA, 20 bp, Artificial Sequence
  Synthetic
tcttcatacctgtatcctct

SEQ ID NO: 37115 - DNA, 20 bp, Artificial Sequence
  Synthetic
atcttcatacctgtatcctc

SEQ ID NO: 37116 - DNA, 20 bp, Artificial Sequence
  Synthetic
ctacaaaagtattcatgcaa

SEQ ID NO: 37117 - DNA, 20 bp, Artificial Sequence
  Synthetic
tgcgaggagatctatatctt

SEQ ID NO: 37118 - DNA, 20 bp, Artificial Sequence
  Synthetic
aagttttggcattttttgcg

SEQ ID NO: 37119 - DNA, 20 bp, Artificial Sequence
  Synthetic
gccaaaacttataatgagcc

SEQ ID NO: 37120 - DNA, 20 bp, Artificial Sequence
  Synthetic
gccaggctcattataagttt

SEQ ID NO: 37121 - DNA, 20 bp, Artificial Sequence
  Synthetic
gcctggctctcaagtattca

SEQ ID NO: 37122 - DNA, 20 bp, Artificial Sequence
  Synthetic
accttgaatacttgagagcc

SEQ ID NO: 37123 - DNA, 20 bp, Artificial Sequence
  Synthetic
ggagttgtcggaataaccaa

SEQ ID NO: 37124 - DNA, 20 bp, Artificial Sequence
  Synthetic
gttcagctattagctgccct

SEQ ID NO: 37125 - DNA, 20 bp, Artificial Sequence
  Synthetic
tttgaaggcaaatggtaaaa

SEQ ID NO: 37126 - DNA, 20 bp, Artificial Sequence
  Synthetic
attttttctttgaaggcaaa

SEQ ID NO: 37127 - DNA, 20 bp, Artificial Sequence
  Synthetic
tcagggtattttttctttga

SEQ ID NO: 37128 - DNA, 20 bp, Artificial Sequence
  Synthetic
taatttgctggtaataatca

SEQ ID NO: 37129 - DNA, 20 bp, Artificial Sequence
  Synthetic
ttaatttgctggtaataatc

SEQ ID NO: 37130 - DNA, 20 bp, Artificial Sequence
  Synthetic
atatgggcattttaatttgc

SEQ ID NO: 37131 - DNA, 20 bp, Artificial Sequence
  Synthetic
cggatctgttgtagtgatat

SEQ ID NO: 37132 - DNA, 20 bp, Artificial Sequence
  Synthetic
ccggatctgttgtagtgata

SEQ ID NO: 37133 - DNA, 20 bp, Artificial Sequence
  Synthetic
ccatatcactacaacagatc

SEQ ID NO: 37134 - DNA, 20 bp, Artificial Sequence
  Synthetic
atatgaaactttagatcatt

SEQ ID NO: 37135 - DNA, 20 bp, Artificial Sequence
  Synthetic
attgggcacattatagcgtt

SEQ ID NO: 37136 - DNA, 20 bp, Artificial Sequence
  Synthetic
cgcttgtagatggctgaatt

SEQ ID NO: 37137 - DNA, 20 bp, Artificial Sequence
  Synthetic
tcgcttgtagatggctgaat

SEQ ID NO: 37138 - DNA, 20 bp, Artificial Sequence
  Synthetic
ttttagaactcgcttgtaga

SEQ ID NO: 37139 - DNA, 20 bp, Artificial Sequence
  Synthetic
ttctctgtgagctcttcatt

SEQ ID NO: 37140 - DNA, 20 bp, Artificial Sequence
  Synthetic
tctctgtgagctcttcatta

SEQ ID NO: 37141 - DNA, 20 bp, Artificial Sequence
  Synthetic
tcattagggcaccaaagcga

SEQ ID NO: 37142 - DNA, 20 bp, Artificial Sequence
  Synthetic
cttcgaactcaccttcgctt

SEQ ID NO: 37143 - DNA, 20 bp, Artificial Sequence
  Synthetic
tcaaccagactattatgaag

SEQ ID NO: 37144 - DNA, 20 bp, Artificial Sequence
  Synthetic
gaaaccacttcataatagtc

SEQ ID NO: 37145 - DNA, 20 bp, Artificial Sequence
  Synthetic
tggattttcatcaagtcaat

SEQ ID NO: 37146 - DNA, 20 bp, Artificial Sequence
  Synthetic
ttggattttcatcaagtcaa

SEQ ID NO: 37147 - DNA, 20 bp, Artificial Sequence
  Synthetic
aatccaacagaaactaaaaa

SEQ ID NO: 37148 - DNA, 20 bp, Artificial Sequence
  Synthetic
cttccatttttagtttctgt

SEQ ID NO: 37149 - DNA, 20 bp, Artificial Sequence
  Synthetic
ttgcattgttaaaaagaagc

SEQ ID NO: 37150 - DNA, 20 bp, Artificial Sequence
  Synthetic
caatgcaaagtcctattata

SEQ ID NO: 37151 - DNA, 20 bp, Artificial Sequence
  Synthetic
ataatttcttaccttataat

SEQ ID NO: 37152 - DNA, 20 bp, Artificial Sequence
  Synthetic
gctttatattcaggagaatc

SEQ ID NO: 37153 - DNA, 20 bp, Artificial Sequence
  Synthetic
ttgcaagcggctttatattc

SEQ ID NO: 37154 - DNA, 20 bp, Artificial Sequence
  Synthetic
tcagaaatatggcactgagg

SEQ ID NO: 37155 - DNA, 20 bp, Artificial Sequence
  Synthetic
gcctcagtgccatatttctg

SEQ ID NO: 37156 - DNA, 20 bp, Artificial Sequence
  Synthetic
gcctcagaaatatggcactg

SEQ ID NO: 37157 - DNA, 20 bp, Artificial Sequence
  Synthetic
agagggaagcctcagaaata

SEQ ID NO: 37158 - DNA, 20 bp, Artificial Sequence
  Synthetic
tcaggcaactcagatctaga

SEQ ID NO: 37159 - DNA, 20 bp, Artificial Sequence
  Synthetic
gtcaggcaactcagatctag

SEQ ID NO: 37160 - DNA, 20 bp, Artificial Sequence
  Synthetic
ttaatagtcagatagtagtc

SEQ ID NO: 37161 - DNA, 20 bp, Artificial Sequence
  Synthetic
tctgactattaaaaagccca

SEQ ID NO: 37162 - DNA, 20 bp, Artificial Sequence
  Synthetic
tattaaaaagcccatggaca

SEQ ID NO: 37163 - DNA, 20 bp, Artificial Sequence
  Synthetic
cgaattttttccatgtccat

SEQ ID NO: 37164 - DNA, 20 bp, Artificial Sequence
  Synthetic
tcgaattttttccatgtcca

SEQ ID NO: 37165 - DNA, 20 bp, Artificial Sequence
  Synthetic
aaaaattcgaagtcacatga

SEQ ID NO: 37166 - DNA, 20 bp, Artificial Sequence
  Synthetic
gtcaatatcttggtacttgt

SEQ ID NO: 37167 - DNA, 20 bp, Artificial Sequence
  Synthetic
gtaccaagatattgactcta

SEQ ID NO: 37168 - DNA, 20 bp, Artificial Sequence
  Synthetic
caaccatagagtcaatatct

SEQ ID NO: 37169 - DNA, 20 bp, Artificial Sequence
  Synthetic
agatattgactctatggttg

SEQ ID NO: 37170 - DNA, 20 bp, Artificial Sequence
  Synthetic
tgcctgtacatacaatgagc

SEQ ID NO: 37171 - DNA, 20 bp, Artificial Sequence
  Synthetic
ctccggctcattgtatgtac

SEQ ID NO: 37172 - DNA, 20 bp, Artificial Sequence
  Synthetic
tctttgtagatcaaagactc

SEQ ID NO: 37173 - DNA, 20 bp, Artificial Sequence
  Synthetic
tttagcagaaattcctgctg

SEQ ID NO: 37174 - DNA, 20 bp, Artificial Sequence
  Synthetic
ggaaagttgggatccacagc

SEQ ID NO: 37175 - DNA, 20 bp, Artificial Sequence
  Synthetic
ggtggtttgttaggaaagtt

SEQ ID NO: 37176 - DNA, 20 bp, Artificial Sequence
  Synthetic
gggtggtttgttaggaaagt

SEQ ID NO: 37177 - DNA, 20 bp, Artificial Sequence
  Synthetic
aatgtaaggggtggtttgtt

SEQ ID NO: 37178 - DNA, 20 bp, Artificial Sequence
  Synthetic
attatgtcaaatgtaagggg

SEQ ID NO: 37179 - DNA, 20 bp, Artificial Sequence
  Synthetic
ctaattatgtcaaatgtaag

SEQ ID NO: 37180 - DNA, 20 bp, Artificial Sequence
  Synthetic
cctaattatgtcaaatgtaa

SEQ ID NO: 37181 - DNA, 20 bp, Artificial Sequence
  Synthetic
cccttacatttgacataatt

SEQ ID NO: 37182 - DNA, 20 bp, Artificial Sequence
  Synthetic
tcctaattatgtcaaatgta

SEQ ID NO: 37183 - DNA, 20 bp, Artificial Sequence
  Synthetic
ttgaaaataatcgctaccgt

SEQ ID NO: 37184 - DNA, 20 bp, Artificial Sequence
  Synthetic
cttgaaataaatcaagccga

SEQ ID NO: 37185 - DNA, 20 bp, Artificial Sequence
  Synthetic
agagcatatgtttgaagtat

SEQ ID NO: 37186 - DNA, 20 bp, Artificial Sequence
  Synthetic
aagtattggaacgagcaaga

SEQ ID NO: 37187 - DNA, 20 bp, Artificial Sequence
  Synthetic
aacgagcaagaaggatgaat

SEQ ID NO: 37188 - DNA, 20 bp, Artificial Sequence
  Synthetic
aagactttgtgacctattta

SEQ ID NO: 37189 - DNA, 20 bp, Artificial Sequence
  Synthetic
tggatggtttaaccataaat

SEQ ID NO: 37190 - DNA, 20 bp, Artificial Sequence
  Synthetic
tatggttaaaccatccaaaa

SEQ ID NO: 37191 - DNA, 20 bp, Artificial Sequence
  Synthetic
tcaggatagtcctttttgga

SEQ ID NO: 37192 - DNA, 20 bp, Artificial Sequence
  Synthetic
ataatcaggatagtcctttt

SEQ ID NO: 37193 - DNA, 20 bp, Artificial Sequence
  Synthetic
aagatgattttataataatc

SEQ ID NO: 37194 - DNA, 20 bp, Artificial Sequence
  Synthetic
tgattattataaaatcatct

SEQ ID NO: 37195 - DNA, 20 bp, Artificial Sequence
  Synthetic
taaaatcatcttggagccaa

SEQ ID NO: 37196 - DNA, 20 bp, Artificial Sequence
  Synthetic
tcaattattttcaagtccat

SEQ ID NO: 37197 - DNA, 20 bp, Artificial Sequence
  Synthetic
atccgcaatgacaaatatgc

SEQ ID NO: 37198 - DNA, 20 bp, Artificial Sequence
  Synthetic
caccagcatatttgtcattg

SEQ ID NO: 37199 - DNA, 20 bp, Artificial Sequence
  Synthetic
tgacaaatatgctggtgaag

SEQ ID NO: 37200 - DNA, 20 bp, Artificial Sequence
  Synthetic
gacaaatatgctggtgaaga

SEQ ID NO: 37201 - DNA, 20 bp, Artificial Sequence
  Synthetic
aagacatgaagctgatgttc

SEQ ID NO: 37202 - DNA, 20 bp, Artificial Sequence
  Synthetic
agctgatgttccggaatgcc

SEQ ID NO: 37203 - DNA, 20 bp, Artificial Sequence
  Synthetic
cattatagtgcctggcattc

SEQ ID NO: 37204 - DNA, 20 bp, Artificial Sequence
  Synthetic
gaatgccaggcactataatg

SEQ ID NO: 37205 - DNA, 20 bp, Artificial Sequence
  Synthetic
tgccaggcactataatgagg

SEQ ID NO: 37206 - DNA, 20 bp, Artificial Sequence
  Synthetic
gccaggcactataatgagga

SEQ ID NO: 37207 - DNA, 20 bp, Artificial Sequence
  Synthetic
gccctcctcattatagtgcc

SEQ ID NO: 37208 - DNA, 20 bp, Artificial Sequence
  Synthetic
ctataatgaggagggctccc

SEQ ID NO: 37209 - DNA, 20 bp, Artificial Sequence
  Synthetic
aaaaacagcatgtaccatgt

SEQ ID NO: 37210 - DNA, 20 bp, Artificial Sequence
  Synthetic
catagacgtaatctccaaca

SEQ ID NO: 37211 - DNA, 20 bp, Artificial Sequence
  Synthetic
tgttggagattacgtctatg

SEQ ID NO: 37212 - DNA, 20 bp, Artificial Sequence
  Synthetic
cgtctatgtggaacctgcag

SEQ ID NO: 37213 - DNA, 20 bp, Artificial Sequence
  Synthetic
ggttgtaggttggcctctgc

SEQ ID NO: 37214 - DNA, 20 bp, Artificial Sequence
  Synthetic
gacgatatgtggttgtaggt

SEQ ID NO: 37215 - DNA, 20 bp, Artificial Sequence
  Synthetic
tacagacgatatgtggttgt

SEQ ID NO: 37216 - DNA, 20 bp, Artificial Sequence
  Synthetic
ctttcaatacagacgatatg

SEQ ID NO: 37217 - DNA, 20 bp, Artificial Sequence
  Synthetic
tcgtctgtattgaaagactg

SEQ ID NO: 37218 - DNA, 20 bp, Artificial Sequence
  Synthetic
cgtctgtattgaaagactgt

SEQ ID NO: 37219 - DNA, 20 bp, Artificial Sequence
  Synthetic
ctgtattgaaagactgtggg

SEQ ID NO: 37220 - DNA, 20 bp, Artificial Sequence
  Synthetic
agactgtgggaggattcagc

SEQ ID NO: 37221 - DNA, 20 bp, Artificial Sequence
  Synthetic
cccatttttgaggtgaaaaa

SEQ ID NO: 37222 - DNA, 20 bp, Artificial Sequence
  Synthetic
tgaggtgaaaaatggttgta

SEQ ID NO: 37223 - DNA, 20 bp, Artificial Sequence
  Synthetic
aaaaatggttgtatggctgt

SEQ ID NO: 37224 - DNA, 20 bp, Artificial Sequence
  Synthetic
ggtggaatgtttcatttggt

SEQ ID NO: 37225 - DNA, 20 bp, Artificial Sequence
  Synthetic
accaaatgaaacattccacc

SEQ ID NO: 37226 - DNA, 20 bp, Artificial Sequence
  Synthetic
gccaggtggaatgtttcatt

SEQ ID NO: 37227 - DNA, 20 bp, Artificial Sequence
  Synthetic
gaaattttcgtgtagccagg

SEQ ID NO: 37228 - DNA, 20 bp, Artificial Sequence
  Synthetic
ctagaaattttcgtgtagcc

SEQ ID NO: 37229 - DNA, 20 bp, Artificial Sequence
  Synthetic
gttccagttagtaaaattct

SEQ ID NO: 37230 - DNA, 20 bp, Artificial Sequence
  Synthetic
ttgcctagaattttactaac

SEQ ID NO: 37231 - DNA, 20 bp, Artificial Sequence
  Synthetic
taaaattctaggcaagtgtg

SEQ ID NO: 37232 - DNA, 20 bp, Artificial Sequence
  Synthetic
gtgtgtggtcatgtttgtca

SEQ ID NO: 37233 - DNA, 20 bp, Artificial Sequence
  Synthetic
ggcataacttaaagtattcc

SEQ ID NO: 37234 - DNA, 20 bp, Artificial Sequence
  Synthetic
cctcatctcggaagttttct

SEQ ID NO: 37235 - DNA, 20 bp, Artificial Sequence
  Synthetic
cccagaaaacttccgagatg

SEQ ID NO: 37236 - DNA, 20 bp, Artificial Sequence
  Synthetic
tcctcatctcggaagttttc

SEQ ID NO: 37237 - DNA, 20 bp, Artificial Sequence
  Synthetic
agacaaaaacatcctcatct

SEQ ID NO: 37238 - DNA, 20 bp, Artificial Sequence
  Synthetic
atgtttttgtctgtgaatca

SEQ ID NO: 37239 - DNA, 20 bp, Artificial Sequence
  Synthetic
tttcttaaaagatttggttt

SEQ ID NO: 37240 - DNA, 20 bp, Artificial Sequence
  Synthetic
tttaattttcttaaaagatt

SEQ ID NO: 37241 - DNA, 20 bp, Artificial Sequence
  Synthetic
ttacaatgacatgtggctga

SEQ ID NO: 37242 - DNA, 20 bp, Artificial Sequence
  Synthetic
aatgacatgtggctgaaggt

SEQ ID NO: 37243 - DNA, 20 bp, Artificial Sequence
  Synthetic
tgtgtcttcatcaagtccca

SEQ ID NO: 37244 - DNA, 20 bp, Artificial Sequence
  Synthetic
cttcatcaagtcccatggcc

SEQ ID NO: 37245 - DNA, 20 bp, Artificial Sequence
  Synthetic
acgaggacgcaccaggccat

SEQ ID NO: 37246 - DNA, 20 bp, Artificial Sequence
  Synthetic
cacgaggacgcaccaggcca

SEQ ID NO: 37247 - DNA, 20 bp, Artificial Sequence
  Synthetic
tggcctggtgcgtcctcgtg

SEQ ID NO: 37248 - DNA, 20 bp, Artificial Sequence
  Synthetic
ggcctggtgcgtcctcgtgt

SEQ ID NO: 37249 - DNA, 20 bp, Artificial Sequence
  Synthetic
tgcccacacgaggacgcacc

SEQ ID NO: 37250 - DNA, 20 bp, Artificial Sequence
  Synthetic
tggtgcgtcctcgtgtgggc

SEQ ID NO: 37251 - DNA, 20 bp, Artificial Sequence
  Synthetic
gacactcacctgcccacacg

SEQ ID NO: 37252 - DNA, 20 bp, Artificial Sequence
  Synthetic
ccccaagaattgaaaaagta

SEQ ID NO: 37253 - DNA, 20 bp, Artificial Sequence
  Synthetic
cccaagaattgaaaaagtat

SEQ ID NO: 37254 - DNA, 20 bp, Artificial Sequence
  Synthetic
gaaaaagtatgggttcgaga

SEQ ID NO: 37255 - DNA, 20 bp, Artificial Sequence
  Synthetic
gatggagctgcatattttta

SEQ ID NO: 37256 - DNA, 20 bp, Artificial Sequence
  Synthetic
cttctgggtgaatgaagatg

SEQ ID NO: 37257 - DNA, 20 bp, Artificial Sequence
  Synthetic
tcttctgggtgaatgaagat

SEQ ID NO: 37258 - DNA, 20 bp, Artificial Sequence
  Synthetic
ttcttctgggtgaatgaaga

SEQ ID NO: 37259 - DNA, 20 bp, Artificial Sequence
  Synthetic
gctcatgctctgtttcttct

SEQ ID NO: 37260 - DNA, 20 bp, Artificial Sequence
  Synthetic
ggctcatgctctgtttcttc

SEQ ID NO: 37261 - DNA, 20 bp, Artificial Sequence
  Synthetic
tttttgtagaacatttttgt

SEQ ID NO: 37262 - DNA, 20 bp, Artificial Sequence
  Synthetic
ttttttgtagaacatttttg

SEQ ID NO: 37263 - DNA, 20 bp, Artificial Sequence
  Synthetic
agaagtatttctgagtaatc

SEQ ID NO: 37264 - DNA, 20 bp, Artificial Sequence
  Synthetic
gagaatacatgtcatggggc

SEQ ID NO: 37265 - DNA, 20 bp, Artificial Sequence
  Synthetic
tgccccatgacatgtattct

SEQ ID NO: 37266 - DNA, 20 bp, Artificial Sequence
  Synthetic
taccgagaatacatgtcatg

SEQ ID NO: 37267 - DNA, 20 bp, Artificial Sequence
  Synthetic
ctaccgagaatacatgtcat

SEQ ID NO: 37268 - DNA, 20 bp, Artificial Sequence
  Synthetic
cctaccgagaatacatgtca

SEQ ID NO: 37269 - DNA, 20 bp, Artificial Sequence
  Synthetic
ccatgacatgtattctcggt

SEQ ID NO: 37270 - DNA, 20 bp, Artificial Sequence
  Synthetic
gtgtgctgtgttgtcattca

SEQ ID NO: 37271 - DNA, 20 bp, Artificial Sequence
  Synthetic
tcaaggacttcctctcctgc

SEQ ID NO: 37272 - DNA, 20 bp, Artificial Sequence
  Synthetic
tttcagttggcctgcaggag

SEQ ID NO: 37273 - DNA, 20 bp, Artificial Sequence
  Synthetic
tggtatttcagttggcctgc

SEQ ID NO: 37274 - DNA, 20 bp, Artificial Sequence
  Synthetic
tcattttctggtatttcagt

SEQ ID NO: 37275 - DNA, 20 bp, Artificial Sequence
  Synthetic
caaagcagaatgtcattttc

SEQ ID NO: 37276 - DNA, 20 bp, Artificial Sequence
  Synthetic
gcttgtcgctctcattgtag

SEQ ID NO: 37277 - DNA, 20 bp, Artificial Sequence
  Synthetic
aagcagatgaagaaattcaa

SEQ ID NO: 37278 - DNA, 20 bp, Artificial Sequence
  Synthetic
cagagcgacagacacaacag

SEQ ID NO: 37279 - DNA, 20 bp, Artificial Sequence
  Synthetic
tgtctgtcgctctgagactg

SEQ ID NO: 37280 - DNA, 20 bp, Artificial Sequence
  Synthetic
cgctctgagactgtggtccc

SEQ ID NO: 37281 - DNA, 20 bp, Artificial Sequence
  Synthetic
gctctgagactgtggtccct

SEQ ID NO: 37282 - DNA, 20 bp, Artificial Sequence
  Synthetic
agactgtggtccctgggaac

SEQ ID NO: 37283 - DNA, 20 bp, Artificial Sequence
  Synthetic
tgtggtccctgggaaccggc

SEQ ID NO: 37284 - DNA, 20 bp, Artificial Sequence
  Synthetic
agctgaccagccggttccca

SEQ ID NO: 37285 - DNA, 20 bp, Artificial Sequence
  Synthetic
cagctgaccagccggttccc

SEQ ID NO: 37286 - DNA, 20 bp, Artificial Sequence
  Synthetic
acttctcacagctgaccagc

SEQ ID NO: 37287 - DNA, 20 bp, Artificial Sequence
  Synthetic
agctgtgagaagtgtcgcca

SEQ ID NO: 37288 - DNA, 20 bp, Artificial Sequence
  Synthetic
tatcactgcagcttatcacc

SEQ ID NO: 37289 - DNA, 20 bp, Artificial Sequence
  Synthetic
accaggactgccatgttccc

SEQ ID NO: 37290 - DNA, 20 bp, Artificial Sequence
  Synthetic
ccctgggaacatggcagtcc

SEQ ID NO: 37291 - DNA, 20 bp, Artificial Sequence
  Synthetic
ccaggactgccatgttccca

SEQ ID NO: 37292 - DNA, 20 bp, Artificial Sequence
  Synthetic
gggctggagccctgggaaca

SEQ ID NO: 37293 - DNA, 20 bp, Artificial Sequence
  Synthetic
gttcccagggctccagcccc

SEQ ID NO: 37294 - DNA, 20 bp, Artificial Sequence
  Synthetic
tctccaggggctggagccct

SEQ ID NO: 37295 - DNA, 20 bp, Artificial Sequence
  Synthetic
ctctccaggggctggagccc

SEQ ID NO: 37296 - DNA, 20 bp, Artificial Sequence
  Synthetic
cagggctccagcccctggag

SEQ ID NO: 37297 - DNA, 20 bp, Artificial Sequence
  Synthetic
agggctccagcccctggaga

SEQ ID NO: 37298 - DNA, 20 bp, Artificial Sequence
  Synthetic
tccagcccctggagagggag

SEQ ID NO: 37299 - DNA, 20 bp, Artificial Sequence
  Synthetic
ccctctccctctccaggggc

SEQ ID NO: 37300 - DNA, 20 bp, Artificial Sequence
  Synthetic
ccagcccctggagagggaga

SEQ ID NO: 37301 - DNA, 20 bp, Artificial Sequence
  Synthetic
tgtgccctctccctctccag

SEQ ID NO: 37302 - DNA, 20 bp, Artificial Sequence
  Synthetic
atgtgccctctccctctcca

SEQ ID NO: 37303 - DNA, 20 bp, Artificial Sequence
  Synthetic
gatgtgccctctccctctcc

SEQ ID NO: 37304 - DNA, 20 bp, Artificial Sequence
  Synthetic
gagagggagagggcacatcc

SEQ ID NO: 37305 - DNA, 20 bp, Artificial Sequence
  Synthetic
agagggagagggcacatcct

SEQ ID NO: 37306 - DNA, 20 bp, Artificial Sequence
  Synthetic
gacacactggcggcataccc

SEQ ID NO: 37307 - DNA, 20 bp, Artificial Sequence
  Synthetic
cgatcgcaaagacacactgg

SEQ ID NO: 37308 - DNA, 20 bp, Artificial Sequence
  Synthetic
tggcgatcgcaaagacacac

SEQ ID NO: 37309 - DNA, 20 bp, Artificial Sequence
  Synthetic
tgtaaaacatgcattatatg

SEQ ID NO: 37310 - DNA, 20 bp, Artificial Sequence
  Synthetic
atcatttcttcttcatggtg

SEQ ID NO: 37311 - DNA, 20 bp, Artificial Sequence
  Synthetic
catcatttcttcttcatggt

SEQ ID NO: 37312 - DNA, 20 bp, Artificial Sequence
  Synthetic
acatcatttcttcttcatgg

SEQ ID NO: 37313 - DNA, 20 bp, Artificial Sequence
  Synthetic
agaacatcatttcttcttca

SEQ ID NO: 37314 - DNA, 20 bp, Artificial Sequence
  Synthetic
ttctgtgatatgtgtgacag

SEQ ID NO: 37315 - DNA, 20 bp, Artificial Sequence
  Synthetic
aggttatcatactttttgtg

SEQ ID NO: 37316 - DNA, 20 bp, Artificial Sequence
  Synthetic
ggttatcatactttttgtgt

SEQ ID NO: 37317 - DNA, 20 bp, Artificial Sequence
  Synthetic
catactttttgtgtgggcct

SEQ ID NO: 37318 - DNA, 20 bp, Artificial Sequence
  Synthetic
ggccttggtgctattccatc

SEQ ID NO: 37319 - DNA, 20 bp, Artificial Sequence
  Synthetic
tacctgatggaatagcacca

SEQ ID NO: 37320 - DNA, 20 bp, Artificial Sequence
  Synthetic
tttttttaatctttacctga

SEQ ID NO: 37321 - DNA, 20 bp, Artificial Sequence
  Synthetic
caatttttttcctaggtcgc

SEQ ID NO: 37322 - DNA, 20 bp, Artificial Sequence
  Synthetic
ggatttgtgactgttgtcag

SEQ ID NO: 37323 - DNA, 20 bp, Artificial Sequence
  Synthetic
gatttgtgactgttgtcagc

SEQ ID NO: 37324 - DNA, 20 bp, Artificial Sequence
  Synthetic
cgacagctgcgatagctgca

SEQ ID NO: 37325 - DNA, 20 bp, Artificial Sequence
  Synthetic
agctgcgatagctgcaagga

SEQ ID NO: 37326 - DNA, 20 bp, Artificial Sequence
  Synthetic
tgcgatagctgcaaggaagg

SEQ ID NO: 37327 - DNA, 20 bp, Artificial Sequence
  Synthetic
ccgggcagtggtcgcagcac

SEQ ID NO: 37328 - DNA, 20 bp, Artificial Sequence
  Synthetic
cctgtgctgcgaccactgcc

SEQ ID NO: 37329 - DNA, 20 bp, Artificial Sequence
  Synthetic
ggtggaaggcagccgggcag

SEQ ID NO: 37330 - DNA, 20 bp, Artificial Sequence
  Synthetic
actggaggtggaaggcagcc

SEQ ID NO: 37331 - DNA, 20 bp, Artificial Sequence
  Synthetic
cactggaggtggaaggcagc

SEQ ID NO: 37332 - DNA, 20 bp, Artificial Sequence
  Synthetic
ctgccttccacctccagtgc

SEQ ID NO: 37333 - DNA, 20 bp, Artificial Sequence
  Synthetic
ttaccagcactggaggtgga

SEQ ID NO: 37334 - DNA, 20 bp, Artificial Sequence
  Synthetic
gaccttaccagcactggagg

SEQ ID NO: 37335 - DNA, 20 bp, Artificial Sequence
  Synthetic
ccagaccttaccagcactgg

SEQ ID NO: 37336 - DNA, 20 bp, Artificial Sequence
  Synthetic
tccccagaccttaccagcac

SEQ ID NO: 37337 - DNA, 20 bp, Artificial Sequence
  Synthetic
acatttcttcactcagtgga

SEQ ID NO: 37338 - DNA, 20 bp, Artificial Sequence
  Synthetic
aacatttcttcactcagtgg

SEQ ID NO: 37339 - DNA, 20 bp, Artificial Sequence
  Synthetic
ggcaacatttcttcactcag

SEQ ID NO: 37340 - DNA, 20 bp, Artificial Sequence
  Synthetic
agtgaagaaatgttgcctcc

SEQ ID NO: 37341 - DNA, 20 bp, Artificial Sequence
  Synthetic
aaatgttgcctcctggagag

SEQ ID NO: 37342 - DNA, 20 bp, Artificial Sequence
  Synthetic
tgacacatccactctccagg

SEQ ID NO: 37343 - DNA, 20 bp, Artificial Sequence
  Synthetic
cggtgacacatccactctcc

SEQ ID NO: 37344 - DNA, 20 bp, Artificial Sequence
  Synthetic
ctggagagtggatgtgtcac

SEQ ID NO: 37345 - DNA, 20 bp, Artificial Sequence
  Synthetic
cctttcggcgaacagtgcac

SEQ ID NO: 37346 - DNA, 20 bp, Artificial Sequence
  Synthetic
aagtctgcttcacgtgtaac

SEQ ID NO: 37347 - DNA, 20 bp, Artificial Sequence
  Synthetic
tttttgcaggagttgccgtg

SEQ ID NO: 37348 - DNA, 20 bp, Artificial Sequence
  Synthetic
actggatgagaggagccaca

SEQ ID NO: 37349 - DNA, 20 bp, Artificial Sequence
  Synthetic
caatagtcacactggatgag

SEQ ID NO: 37350 - DNA, 20 bp, Artificial Sequence
  Synthetic
ggagagggcaatagtcacac

SEQ ID NO: 37351 - DNA, 20 bp, Artificial Sequence
  Synthetic
ttgccctctcctgtttcaca

SEQ ID NO: 37352 - DNA, 20 bp, Artificial Sequence
  Synthetic
aatccatgtgaaacaggaga

SEQ ID NO: 37353 - DNA, 20 bp, Artificial Sequence
  Synthetic
caatccatgtgaaacaggag

SEQ ID NO: 37354 - DNA, 20 bp, Artificial Sequence
  Synthetic
cgaggcaatccatgtgaaac

SEQ ID NO: 37355 - DNA, 20 bp, Artificial Sequence
  Synthetic
tggcagtgagcggcggctcg

SEQ ID NO: 37356 - DNA, 20 bp, Artificial Sequence
  Synthetic
aggggcatggcagtgagcgg

SEQ ID NO: 37357 - DNA, 20 bp, Artificial Sequence
  Synthetic
gccgctcactgccatgcccc

SEQ ID NO: 37358 - DNA, 20 bp, Artificial Sequence
  Synthetic
cccaggggcatggcagtgag

SEQ ID NO: 37359 - DNA, 20 bp, Artificial Sequence
  Synthetic
ccgctcactgccatgcccct

SEQ ID NO: 37360 - DNA, 20 bp, Artificial Sequence
  Synthetic
ctgccatgcccctgggcaga

SEQ ID NO: 37361 - DNA, 20 bp, Artificial Sequence
  Synthetic
catccatctgcccaggggca

SEQ ID NO: 37362 - DNA, 20 bp, Artificial Sequence
  Synthetic
ggacacatccatctgcccag

SEQ ID NO: 37363 - DNA, 20 bp, Artificial Sequence
  Synthetic
cggacacatccatctgccca

SEQ ID NO: 37364 - DNA, 20 bp, Artificial Sequence
  Synthetic
tcggacacatccatctgccc

SEQ ID NO: 37365 - DNA, 20 bp, Artificial Sequence
  Synthetic
aaatggcttcatgcagaagc

SEQ ID NO: 37366 - DNA, 20 bp, Artificial Sequence
  Synthetic
ttctgcatgaagccatttgc

SEQ ID NO: 37367 - DNA, 20 bp, Artificial Sequence
  Synthetic
atcatggggcggccggcaaa

SEQ ID NO: 37368 - DNA, 20 bp, Artificial Sequence
  Synthetic
acactcgatcatggggcggc

SEQ ID NO: 37369 - DNA, 20 bp, Artificial Sequence
  Synthetic
cattacactcgatcatgggg

SEQ ID NO: 37370 - DNA, 20 bp, Artificial Sequence
  Synthetic
actcattacactcgatcatg

SEQ ID NO: 37371 - DNA, 20 bp, Artificial Sequence
  Synthetic
cactcattacactcgatcat

SEQ ID NO: 37372 - DNA, 20 bp, Artificial Sequence
  Synthetic
gcactcattacactcgatca

SEQ ID NO: 37373 - DNA, 20 bp, Artificial Sequence
  Synthetic
agtgtaatgagtgccacacc

SEQ ID NO: 37374 - DNA, 20 bp, Artificial Sequence
  Synthetic
aggacaggtgaatccaggtg

SEQ ID NO: 37375 - DNA, 20 bp, Artificial Sequence
  Synthetic
cgcacaggacaggtgaatcc

SEQ ID NO: 37376 - DNA, 20 bp, Artificial Sequence
  Synthetic
acctgtcctgtgcgaaaatc

SEQ ID NO: 37377 - DNA, 20 bp, Artificial Sequence
  Synthetic
tccggattttcgcacaggac

SEQ ID NO: 37378 - DNA, 20 bp, Artificial Sequence
  Synthetic
ggatttccggattttcgcac

SEQ ID NO: 37379 - DNA, 20 bp, Artificial Sequence
  Synthetic
cttctggaacattggatttc

SEQ ID NO: 37380 - DNA, 20 bp, Artificial Sequence
  Synthetic
gacaaacacttctggaacat

SEQ ID NO: 37381 - DNA, 20 bp, Artificial Sequence
  Synthetic
ttttggcagacaaacacttc

SEQ ID NO: 37382 - DNA, 20 bp, Artificial Sequence
  Synthetic
tgtttgtctgccaaaagtgc

SEQ ID NO: 37383 - DNA, 20 bp, Artificial Sequence
  Synthetic
gtttgtctgccaaaagtgcc

SEQ ID NO: 37384 - DNA, 20 bp, Artificial Sequence
  Synthetic
acttggagtcccggcacttt

SEQ ID NO: 37385 - DNA, 20 bp, Artificial Sequence
  Synthetic
ggatgtcaaacttggagtcc

SEQ ID NO: 37386 - DNA, 20 bp, Artificial Sequence
  Synthetic
aactgaatgtgcaacttgca

SEQ ID NO: 37387 - DNA, 20 bp, Artificial Sequence
  Synthetic
actgaatgtgcaacttgcaa

SEQ ID NO: 37388 - DNA, 20 bp, Artificial Sequence
  Synthetic
tgtgcaacttgcaagggaac

SEQ ID NO: 37389 - DNA, 20 bp, Artificial Sequence
  Synthetic
gagacaatgaaaatcttgtc

SEQ ID NO: 37390 - DNA, 20 bp, Artificial Sequence
  Synthetic
tgcagactctgctaccattt

SEQ ID NO: 37391 - DNA, 20 bp, Artificial Sequence
  Synthetic
ctgctaccattttggctgtt

SEQ ID NO: 37392 - DNA, 20 bp, Artificial Sequence
  Synthetic
gaggatccaaacagccaaaa

SEQ ID NO: 37393 - DNA, 20 bp, Artificial Sequence
  Synthetic
ttaggagactttttcaaagg

SEQ ID NO: 37394 - DNA, 20 bp, Artificial Sequence
  Synthetic
tgtttaggagactttttcaa

SEQ ID NO: 37395 - DNA, 20 bp, Artificial Sequence
  Synthetic
aaaaagtctcctaaacagac

SEQ ID NO: 37396 - DNA, 20 bp, Artificial Sequence
  Synthetic
tctcctaaacagacaggcta

SEQ ID NO: 37397 - DNA, 20 bp, Artificial Sequence
  Synthetic
catccgtagcctgtctgttt

SEQ ID NO: 37398 - DNA, 20 bp, Artificial Sequence
  Synthetic
ctaaacagacaggctacgga

SEQ ID NO: 37399 - DNA, 20 bp, Artificial Sequence
  Synthetic
aggctacggatggatatgtc

SEQ ID NO: 37400 - DNA, 20 bp, Artificial Sequence
  Synthetic
tctgatttgctgtgtttgtc

SEQ ID NO: 37401 - DNA, 20 bp, Artificial Sequence
  Synthetic
ctgatttgctgtgtttgtct

SEQ ID NO: 37402 - DNA, 20 bp, Artificial Sequence
  Synthetic
ttgtctgggagataatagtg

SEQ ID NO: 37403 - DNA, 20 bp, Artificial Sequence
  Synthetic
ataattcagtgtgacaattg

SEQ ID NO: 37404 - DNA, 20 bp, Artificial Sequence
  Synthetic
tgtggcattacagtccatga

SEQ ID NO: 37405 - DNA, 20 bp, Artificial Sequence
  Synthetic
agaaagcaacattaccttca

SEQ ID NO: 37406 - DNA, 20 bp, Artificial Sequence
  Synthetic
ttgttttttttaggttgtta

SEQ ID NO: 37407 - DNA, 20 bp, Artificial Sequence
  Synthetic
ttaggttgttatggagttga

SEQ ID NO: 37408 - DNA, 20 bp, Artificial Sequence
  Synthetic
ctgaaaactccactgaacct

SEQ ID NO: 37409 - DNA, 20 bp, Artificial Sequence
  Synthetic
atcacaaaaccaaggttcag

SEQ ID NO: 37410 - DNA, 20 bp, Artificial Sequence
  Synthetic
ttacaggcatcacaaaacca

SEQ ID NO: 37411 - DNA, 20 bp, Artificial Sequence
  Synthetic
ttttgtgatgcctgtaaatg

SEQ ID NO: 37412 - DNA, 20 bp, Artificial Sequence
  Synthetic
aggagaaacaccacatttac

SEQ ID NO: 37413 - DNA, 20 bp, Artificial Sequence
  Synthetic
ctgcctttattaaaagttgt

SEQ ID NO: 37414 - DNA, 20 bp, Artificial Sequence
  Synthetic
ataaaagaagatgctgatca

SEQ ID NO: 37415 - DNA, 20 bp, Artificial Sequence
  Synthetic
aagatggtaatgtagtttac

SEQ ID NO: 37416 - DNA, 20 bp, Artificial Sequence
  Synthetic
tgtaaactacattaccatct

SEQ ID NO: 37417 - DNA, 20 bp, Artificial Sequence
  Synthetic
acattaccatcttggatgtc

SEQ ID NO: 37418 - DNA, 20 bp, Artificial Sequence
  Synthetic
gaggatccagacatccaaga

SEQ ID NO: 37419 - DNA, 20 bp, Artificial Sequence
  Synthetic
gtctggatcctcctcttaca

SEQ ID NO: 37420 - DNA, 20 bp, Artificial Sequence
  Synthetic
cttggcatccttgtaagagg

SEQ ID NO: 37421 - DNA, 20 bp, Artificial Sequence
  Synthetic
tttcttggcatccttgtaag

SEQ ID NO: 37422 - DNA, 20 bp, Artificial Sequence
  Synthetic
taactgtttttggtctttct

SEQ ID NO: 37423 - DNA, 20 bp, Artificial Sequence
  Synthetic
gaaagaccaaaaacagttat

SEQ ID NO: 37424 - DNA, 20 bp, Artificial Sequence
  Synthetic
tactcaccaataactgtttt

SEQ ID NO: 37425 - DNA, 20 bp, Artificial Sequence
  Synthetic
ccctttatgtaggcagtgct

SEQ ID NO: 37426 - DNA, 20 bp, Artificial Sequence
  Synthetic
gcagtgctcggaatgtgacc

SEQ ID NO: 37427 - DNA, 20 bp, Artificial Sequence
  Synthetic
tgctcggaatgtgaccaggc

SEQ ID NO: 37428 - DNA, 20 bp, Artificial Sequence
  Synthetic
cccaagtgcaacatctgcct

SEQ ID NO: 37429 - DNA, 20 bp, Artificial Sequence
  Synthetic
ccctaggcagatgttgcact

SEQ ID NO: 37430 - DNA, 20 bp, Artificial Sequence
  Synthetic
ccaagtgcaacatctgccta

SEQ ID NO: 37431 - DNA, 20 bp, Artificial Sequence
  Synthetic
atctgcctagggaagacatc

SEQ ID NO: 37432 - DNA, 20 bp, Artificial Sequence
  Synthetic
tctgcctagggaagacatca

SEQ ID NO: 37433 - DNA, 20 bp, Artificial Sequence
  Synthetic
gcggccctgatgtcttccct

SEQ ID NO: 37434 - DNA, 20 bp, Artificial Sequence
  Synthetic
cagatgaggatctcattcag

SEQ ID NO: 37435 - DNA, 20 bp, Artificial Sequence
  Synthetic
ctgaatgagatcctcatctg

SEQ ID NO: 37436 - DNA, 20 bp, Artificial Sequence
  Synthetic
tgaatgagatcctcatctgc

SEQ ID NO: 37437 - DNA, 20 bp, Artificial Sequence
  Synthetic
atcctcatctgcgggaagtg

SEQ ID NO: 37438 - DNA, 20 bp, Artificial Sequence
  Synthetic
ggccacacttcccgcagatg

SEQ ID NO: 37439 - DNA, 20 bp, Artificial Sequence
  Synthetic
catctgcgggaagtgtggcc

SEQ ID NO: 37440 - DNA, 20 bp, Artificial Sequence
  Synthetic
atctgcgggaagtgtggcct

SEQ ID NO: 37441 - DNA, 20 bp, Artificial Sequence
  Synthetic
tggggatgtggcactgctgg

SEQ ID NO: 37442 - DNA, 20 bp, Artificial Sequence
  Synthetic
ctatggggatgtggcactgc

SEQ ID NO: 37443 - DNA, 20 bp, Artificial Sequence
  Synthetic
gcagtgccacatccccatag

SEQ ID NO: 37444 - DNA, 20 bp, Artificial Sequence
  Synthetic
cagtgccacatccccatagc

SEQ ID NO: 37445 - DNA, 20 bp, Artificial Sequence
  Synthetic
cactgcccgctatggggatg

SEQ ID NO: 37446 - DNA, 20 bp, Artificial Sequence
  Synthetic
ggtcagcactgcccgctatg

SEQ ID NO: 37447 - DNA, 20 bp, Artificial Sequence
  Synthetic
tggtcagcactgcccgctat

SEQ ID NO: 37448 - DNA, 20 bp, Artificial Sequence
  Synthetic
ctggtcagcactgcccgcta

SEQ ID NO: 37449 - DNA, 20 bp, Artificial Sequence
  Synthetic
accagcccctgctcacacct

SEQ ID NO: 37450 - DNA, 20 bp, Artificial Sequence
  Synthetic
accaaggtgtgagcaggggc

SEQ ID NO: 37451 - DNA, 20 bp, Artificial Sequence
  Synthetic
cagaaccaaggtgtgagcag

SEQ ID NO: 37452 - DNA, 20 bp, Artificial Sequence
  Synthetic
gcagaaccaaggtgtgagca

SEQ ID NO: 37453 - DNA, 20 bp, Artificial Sequence
  Synthetic
ggcagaaccaaggtgtgagc

SEQ ID NO: 37454 - DNA, 20 bp, Artificial Sequence
  Synthetic
atgcagcgtcggcagaacca

SEQ ID NO: 37455 - DNA, 20 bp, Artificial Sequence
  Synthetic
ccagtgcgaagatgcagcgt

SEQ ID NO: 37456 - DNA, 20 bp, Artificial Sequence
  Synthetic
tgcccgtgtactgcgtctgc

SEQ ID NO: 37457 - DNA, 20 bp, Artificial Sequence
  Synthetic
gagccggcagacgcagtaca

SEQ ID NO: 37458 - DNA, 20 bp, Artificial Sequence
  Synthetic
gggtaacgtcgtaggggagc

SEQ ID NO: 37459 - DNA, 20 bp, Artificial Sequence
  Synthetic
tgaagcgggtaacgtcgtag

SEQ ID NO: 37460 - DNA, 20 bp, Artificial Sequence
  Synthetic
atgaagcgggtaacgtcgta

SEQ ID NO: 37461 - DNA, 20 bp, Artificial Sequence
  Synthetic
catgaagcgggtaacgtcgt

SEQ ID NO: 37462 - DNA, 20 bp, Artificial Sequence
  Synthetic
gtcgcactcgatcatgaagc

SEQ ID NO: 37463 - DNA, 20 bp, Artificial Sequence
  Synthetic
cgtcgcactcgatcatgaag

SEQ ID NO: 37464 - DNA, 20 bp, Artificial Sequence
  Synthetic
gatcgagtgcgacgcctgca

SEQ ID NO: 37465 - DNA, 20 bp, Artificial Sequence
  Synthetic
agtgcgacgcctgcaaggac

SEQ ID NO: 37466 - DNA, 20 bp, Artificial Sequence
  Synthetic
gcctgcaaggactggttcca

SEQ ID NO: 37467 - DNA, 20 bp, Artificial Sequence
  Synthetic
gccgtggaaccagtccttgc

SEQ ID NO: 37468 - DNA, 20 bp, Artificial Sequence
  Synthetic
gcaaggactggttccacggc

SEQ ID NO: 37469 - DNA, 20 bp, Artificial Sequence
  Synthetic
cgccgcgcgctcacctgccg

SEQ ID NO: 37470 - DNA, 20 bp, Artificial Sequence
  Synthetic
tcgtctcgtttcagctgtgt

SEQ ID NO: 37471 - DNA, 20 bp, Artificial Sequence
  Synthetic
cgtctcgtttcagctgtgtt

SEQ ID NO: 37472 - DNA, 20 bp, Artificial Sequence
  Synthetic
gtctcgtttcagctgtgttg

SEQ ID NO: 37473 - DNA, 20 bp, Artificial Sequence
  Synthetic
tcgtttcagctgtgttgggg

SEQ ID NO: 37474 - DNA, 20 bp, Artificial Sequence
  Synthetic
cagctgtgttggggtggaag

SEQ ID NO: 37475 - DNA, 20 bp, Artificial Sequence
  Synthetic
ctgtgttggggtggaagagg

SEQ ID NO: 37476 - DNA, 20 bp, Artificial Sequence
  Synthetic
tgttggggtggaagaggagg

SEQ ID NO: 37477 - DNA, 20 bp, Artificial Sequence
  Synthetic
cagtggtatatgtcgatgtc

SEQ ID NO: 37478 - DNA, 20 bp, Artificial Sequence
  Synthetic
gcagtggtatatgtcgatgt

SEQ ID NO: 37479 - DNA, 20 bp, Artificial Sequence
  Synthetic
ttttctcacagtttgggcag

SEQ ID NO: 37480 - DNA, 20 bp, Artificial Sequence
  Synthetic
catgggttttctcacagttt

SEQ ID NO: 37481 - DNA, 20 bp, Artificial Sequence
  Synthetic
ccatgggttttctcacagtt

SEQ ID NO: 37482 - DNA, 20 bp, Artificial Sequence
  Synthetic
cacgcagattaggcagtact

SEQ ID NO: 37483 - DNA, 20 bp, Artificial Sequence
  Synthetic
gtactgcctaatctgcgtga

SEQ ID NO: 37484 - DNA, 20 bp, Artificial Sequence
  Synthetic
aactgtccttcacgcagatt

SEQ ID NO: 37485 - DNA, 20 bp, Artificial Sequence
  Synthetic
accgacttccacatcgactc

SEQ ID NO: 37486 - DNA, 20 bp, Artificial Sequence
  Synthetic
cccagagtcgatgtggaagt

SEQ ID NO: 37487 - DNA, 20 bp, Artificial Sequence
  Synthetic
ccgacttccacatcgactct

SEQ ID NO: 37488 - DNA, 20 bp, Artificial Sequence
  Synthetic
cgacttccacatcgactctg

SEQ ID NO: 37489 - DNA, 20 bp, Artificial Sequence
  Synthetic
gacttccacatcgactctgg

SEQ ID NO: 37490 - DNA, 20 bp, Artificial Sequence
  Synthetic
aggcgcccccagagtcgatg

SEQ ID NO: 37491 - DNA, 20 bp, Artificial Sequence
  Synthetic
actctgggggcgcctctgcc

SEQ ID NO: 37492 - DNA, 20 bp, Artificial Sequence
  Synthetic
gagcacgtggtaccaggcag

SEQ ID NO: 37493 - DNA, 20 bp, Artificial Sequence
  Synthetic
tgcctggtaccacgtgctca

SEQ ID NO: 37494 - DNA, 20 bp, Artificial Sequence
  Synthetic
caccttgagcacgtggtacc

SEQ ID NO: 37495 - DNA, 20 bp, Artificial Sequence
  Synthetic
cgtggctcaccttgagcacg

SEQ ID NO: 37496 - DNA, 20 bp, Artificial Sequence
  Synthetic
agaagaccttctatctcatc

SEQ ID NO: 37497 - DNA, 20 bp, Artificial Sequence
  Synthetic
gaccttctatctcatcaggc

SEQ ID NO: 37498 - DNA, 20 bp, Artificial Sequence
  Synthetic
ggccggcctgatgagataga

SEQ ID NO: 37499 - DNA, 20 bp, Artificial Sequence
  Synthetic
ctatctcatcaggccggcct

SEQ ID NO: 37500 - DNA, 20 bp, Artificial Sequence
  Synthetic
agggagatgttggccgaggc

SEQ ID NO: 37501 - DNA, 20 bp, Artificial Sequence
  Synthetic
atacagggagatgttggccg

SEQ ID NO: 37502 - DNA, 20 bp, Artificial Sequence
  Synthetic
gcgctcatacagggagatgt

SEQ ID NO: 37503 - DNA, 20 bp, Artificial Sequence
  Synthetic
acatctccctgtatgagcgc

SEQ ID NO: 37504 - DNA, 20 bp, Artificial Sequence
  Synthetic
tctccctgtatgagcgctgg

SEQ ID NO: 37505 - DNA, 20 bp, Artificial Sequence
  Synthetic
agaccgccagcgctcataca

SEQ ID NO: 37506 - DNA, 20 bp, Artificial Sequence
  Synthetic
cagaccgccagcgctcatac

SEQ ID NO: 37507 - DNA, 20 bp, Artificial Sequence
  Synthetic
gaacatctcgctgtggttag

SEQ ID NO: 37508 - DNA, 20 bp, Artificial Sequence
  Synthetic
cagcaaagaacatctcgctg

SEQ ID NO: 37509 - DNA, 20 bp, Artificial Sequence
  Synthetic
cgagatgttctttgctgacc

SEQ ID NO: 37510 - DNA, 20 bp, Artificial Sequence
  Synthetic
acttgtagcatttgtcgacc

SEQ ID NO: 37511 - DNA, 20 bp, Artificial Sequence
  Synthetic
ctacaagtgcatcgtcaagc

SEQ ID NO: 37512 - DNA, 20 bp, Artificial Sequence
  Synthetic
tacaagtgcatcgtcaagca

SEQ ID NO: 37513 - DNA, 20 bp, Artificial Sequence
  Synthetic
ctgaggggatgaagagggtc

SEQ ID NO: 37514 - DNA, 20 bp, Artificial Sequence
  Synthetic
cagaccctcttcatcccctc

SEQ ID NO: 37515 - DNA, 20 bp, Artificial Sequence
  Synthetic
ctcacctgaggggatgaaga

SEQ ID NO: 37516 - DNA, 20 bp, Artificial Sequence
  Synthetic
actcacctgaggggatgaag

SEQ ID NO: 37517 - DNA, 20 bp, Artificial Sequence
  Synthetic
gctgcccgcactcacctgag

SEQ ID NO: 37518 - DNA, 20 bp, Artificial Sequence
  Synthetic
agctgcccgcactcacctga

SEQ ID NO: 37519 - DNA, 20 bp, Artificial Sequence
  Synthetic
aagctgcccgcactcacctg

SEQ ID NO: 37520 - DNA, 20 bp, Artificial Sequence
  Synthetic
agtgtggcgtagatccagcc

SEQ ID NO: 37521 - DNA, 20 bp, Artificial Sequence
  Synthetic
ctacgccacactcacccctg

SEQ ID NO: 37522 - DNA, 20 bp, Artificial Sequence
  Synthetic
gcagtccacaggggtgagtg

SEQ ID NO: 37523 - DNA, 20 bp, Artificial Sequence
  Synthetic
actcacccctgtggactgcc

SEQ ID NO: 37524 - DNA, 20 bp, Artificial Sequence
  Synthetic
gaaggccaggcagtccacag

SEQ ID NO: 37525 - DNA, 20 bp, Artificial Sequence
  Synthetic
cgaaggccaggcagtccaca

SEQ ID NO: 37526 - DNA, 20 bp, Artificial Sequence
  Synthetic
gcgaaggccaggcagtccac

SEQ ID NO: 37527 - DNA, 20 bp, Artificial Sequence
  Synthetic
tgtggactgcctggccttcg

SEQ ID NO: 37528 - DNA, 20 bp, Artificial Sequence
  Synthetic
gtggactgcctggccttcgc

SEQ ID NO: 37529 - DNA, 20 bp, Artificial Sequence
  Synthetic
ggaaatgtcccgcgaaggcc

SEQ ID NO: 37530 - DNA, 20 bp, Artificial Sequence
  Synthetic
gtggaggaaatgtcccgcga

SEQ ID NO: 37531 - DNA, 20 bp, Artificial Sequence
  Synthetic
tgcagcgtttgcagaaaaag

SEQ ID NO: 37532 - DNA, 20 bp, Artificial Sequence
  Synthetic
atgtgtcgcacatcagtaac

SEQ ID NO: 37533 - DNA, 20 bp, Artificial Sequence
  Synthetic
atgttcccgtgtatatcatt

SEQ ID NO: 37534 - DNA, 20 bp, Artificial Sequence
  Synthetic
gcagtccaaatgatatacac

SEQ ID NO: 37535 - DNA, 20 bp, Artificial Sequence
  Synthetic
agcagtccaaatgatataca

SEQ ID NO: 37536 - DNA, 20 bp, Artificial Sequence
  Synthetic
tgggaattgttttcagaggg

SEQ ID NO: 37537 - DNA, 20 bp, Artificial Sequence
  Synthetic
ttgggaattgttttcagagg

SEQ ID NO: 37538 - DNA, 20 bp, Artificial Sequence
  Synthetic
cttgggaattgttttcagag

SEQ ID NO: 37539 - DNA, 20 bp, Artificial Sequence
  Synthetic
ccttgggaattgttttcaga

SEQ ID NO: 37540 - DNA, 20 bp, Artificial Sequence
  Synthetic
ccctctgaaaacaattccca

SEQ ID NO: 37541 - DNA, 20 bp, Artificial Sequence
  Synthetic
cccttgggaattgttttcag

SEQ ID NO: 37542 - DNA, 20 bp, Artificial Sequence
  Synthetic
cctctgaaaacaattcccaa

SEQ ID NO: 37543 - DNA, 20 bp, Artificial Sequence
  Synthetic
aaacaattcccaagggcatg

SEQ ID NO: 37544 - DNA, 20 bp, Artificial Sequence
  Synthetic
ggacagatccacatgccctt

SEQ ID NO: 37545 - DNA, 20 bp, Artificial Sequence
  Synthetic
gggacagatccacatgccct

SEQ ID NO: 37546 - DNA, 20 bp, Artificial Sequence
  Synthetic
gtggatctgtcccagatgtc

SEQ ID NO: 37547 - DNA, 20 bp, Artificial Sequence
  Synthetic
ctgtcccagatgtcaggacc

SEQ ID NO: 37548 - DNA, 20 bp, Artificial Sequence
  Synthetic
agtacctggtcctgacatct

SEQ ID NO: 37549 - DNA, 20 bp, Artificial Sequence
  Synthetic
cagtacctggtcctgacatc

SEQ ID NO: 37550 - DNA, 20 bp, Artificial Sequence
  Synthetic
cactgtgccgcctgcaagcg

SEQ ID NO: 37551 - DNA, 20 bp, Artificial Sequence
  Synthetic
actgtgccgcctgcaagcga

SEQ ID NO: 37552 - DNA, 20 bp, Artificial Sequence
  Synthetic
ctgtgccgcctgcaagcgag

SEQ ID NO: 37553 - DNA, 20 bp, Artificial Sequence
  Synthetic
gttggcccctcgcttgcagg

SEQ ID NO: 37554 - DNA, 20 bp, Artificial Sequence
  Synthetic
caggttggcccctcgcttgc

SEQ ID NO: 37555 - DNA, 20 bp, Artificial Sequence
  Synthetic
ggggccaacctgcagccctg

SEQ ID NO: 37556 - DNA, 20 bp, Artificial Sequence
  Synthetic
ggtgccgcagggctgcaggt

SEQ ID NO: 37557 - DNA, 20 bp, Artificial Sequence
  Synthetic
ggcaggtgccgcagggctgc

SEQ ID NO: 37558 - DNA, 20 bp, Artificial Sequence
  Synthetic
gcagccctgcggcacctgcc

SEQ ID NO: 37559 - DNA, 20 bp, Artificial Sequence
  Synthetic
cagccctgcggcacctgccc

SEQ ID NO: 37560 - DNA, 20 bp, Artificial Sequence
  Synthetic
agccctgcggcacctgcccg

SEQ ID NO: 37561 - DNA, 20 bp, Artificial Sequence
  Synthetic
gccctgcggcacctgcccgg

SEQ ID NO: 37562 - DNA, 20 bp, Artificial Sequence
  Synthetic
gcccccgggcaggtgccgca

SEQ ID NO: 37563 - DNA, 20 bp, Artificial Sequence
  Synthetic
ggcccccgggcaggtgccgc

SEQ ID NO: 37564 - DNA, 20 bp, Artificial Sequence
  Synthetic
gaggtggtaggcccccgggc

SEQ ID NO: 37565 - DNA, 20 bp, Artificial Sequence
  Synthetic
agctgaggtggtaggccccc

SEQ ID NO: 37566 - DNA, 20 bp, Artificial Sequence
  Synthetic
cagctgaggtggtaggcccc

SEQ ID NO: 37567 - DNA, 20 bp, Artificial Sequence
  Synthetic
ggcctaccacctcagctgcc

SEQ ID NO: 37568 - DNA, 20 bp, Artificial Sequence
  Synthetic
ctccaggcagctgaggtggt

SEQ ID NO: 37569 - DNA, 20 bp, Artificial Sequence
  Synthetic
gcggctccaggcagctgagg

SEQ ID NO: 37570 - DNA, 20 bp, Artificial Sequence
  Synthetic
ggggcggctccaggcagctg

SEQ ID NO: 37571 - DNA, 20 bp, Artificial Sequence
  Synthetic
ccgtcttgaggggcggctcc

SEQ ID NO: 37572 - DNA, 20 bp, Artificial Sequence
  Synthetic
cctggagccgcccctcaaga

SEQ ID NO: 37573 - DNA, 20 bp, Artificial Sequence
  Synthetic
ttgggcgccgtcttgagggg

SEQ ID NO: 37574 - DNA, 20 bp, Artificial Sequence
  Synthetic
gcccctcaagacggcgccca

SEQ ID NO: 37575 - DNA, 20 bp, Artificial Sequence
  Synthetic
cccttgggcgccgtcttgag

SEQ ID NO: 37576 - DNA, 20 bp, Artificial Sequence
  Synthetic
cccctcaagacggcgcccaa

SEQ ID NO: 37577 - DNA, 20 bp, Artificial Sequence
  Synthetic
gcccttgggcgccgtcttga

SEQ ID NO: 37578 - DNA, 20 bp, Artificial Sequence
  Synthetic
cgcccttgggcgccgtcttg

SEQ ID NO: 37579 - DNA, 20 bp, Artificial Sequence
  Synthetic
agacggcgcccaagggcgtg

SEQ ID NO: 37580 - DNA, 20 bp, Artificial Sequence
  Synthetic
gacggcgcccaagggcgtgt

SEQ ID NO: 37581 - DNA, 20 bp, Artificial Sequence
  Synthetic
gggcacacccacacgccctt

SEQ ID NO: 37582 - DNA, 20 bp, Artificial Sequence
  Synthetic
ggggcacacccacacgccct

SEQ ID NO: 37583 - DNA, 20 bp, Artificial Sequence
  Synthetic
agggcgtgtgggtgtgcccc

SEQ ID NO: 37584 - DNA, 20 bp, Artificial Sequence
  Synthetic
gtgccccaggtgccagcaga

SEQ ID NO: 37585 - DNA, 20 bp, Artificial Sequence
  Synthetic
gtaccttctgctggcacctg

SEQ ID NO: 37586 - DNA, 20 bp, Artificial Sequence
  Synthetic
tgtaccttctgctggcacct

SEQ ID NO: 37587 - DNA, 20 bp, Artificial Sequence
  Synthetic
ctgtaccttctgctggcacc

SEQ ID NO: 37588 - DNA, 20 bp, Artificial Sequence
  Synthetic
cagcctcctgtaccttctgc

SEQ ID NO: 37589 - DNA, 20 bp, Artificial Sequence
  Synthetic
tactgtcgaaagccctttgc

SEQ ID NO: 37590 - DNA, 20 bp, Artificial Sequence
  Synthetic
actgtcgaaagccctttgca

SEQ ID NO: 37591 - DNA, 20 bp, Artificial Sequence
  Synthetic
gtcgaaagccctttgcaggg

SEQ ID NO: 37592 - DNA, 20 bp, Artificial Sequence
  Synthetic
atcatgggccgccctgcaaa

SEQ ID NO: 37593 - DNA, 20 bp, Artificial Sequence
  Synthetic
aatcatgggccgccctgcaa

SEQ ID NO: 37594 - DNA, 20 bp, Artificial Sequence
  Synthetic
cacaggctgcactcaatcat

SEQ ID NO: 37595 - DNA, 20 bp, Artificial Sequence
  Synthetic
acacaggctgcactcaatca

SEQ ID NO: 37596 - DNA, 20 bp, Artificial Sequence
  Synthetic
atgattgagtgcagcctgtg

SEQ ID NO: 37597 - DNA, 20 bp, Artificial Sequence
  Synthetic
tgattgagtgcagcctgtgt

SEQ ID NO: 37598 - DNA, 20 bp, Artificial Sequence
  Synthetic
agtgcagcctgtgtgggacg

SEQ ID NO: 37599 - DNA, 20 bp, Artificial Sequence
  Synthetic
ggtggatccacgtcccacac

SEQ ID NO: 37600 - DNA, 20 bp, Artificial Sequence
  Synthetic
taatcttagcacaggagagg

SEQ ID NO: 37601 - DNA, 20 bp, Artificial Sequence
  Synthetic
tcttaatcttagcacaggag

SEQ ID NO: 37602 - DNA, 20 bp, Artificial Sequence
  Synthetic
ggtcttcttaatcttagcac

SEQ ID NO: 37603 - DNA, 20 bp, Artificial Sequence
  Synthetic
ataaaagaagtcggggacgt

SEQ ID NO: 37604 - DNA, 20 bp, Artificial Sequence
  Synthetic
tctggcaataaaagaagtcg

SEQ ID NO: 37605 - DNA, 20 bp, Artificial Sequence
  Synthetic
ttctggcaataaaagaagtc

SEQ ID NO: 37606 - DNA, 20 bp, Artificial Sequence
  Synthetic
tttctggcaataaaagaagt

SEQ ID NO: 37607 - DNA, 20 bp, Artificial Sequence
  Synthetic
cttttattgccagaaatgca

SEQ ID NO: 37608 - DNA, 20 bp, Artificial Sequence
  Synthetic
gcctcagttccttgcatttc

SEQ ID NO: 37609 - DNA, 20 bp, Artificial Sequence
  Synthetic
ggactcccagcaagcagtgt

SEQ ID NO: 37610 - DNA, 20 bp, Artificial Sequence
  Synthetic
gggttttgcaaaaaaccaca

SEQ ID NO: 37611 - DNA, 20 bp, Artificial Sequence
  Synthetic
gcaaaaaaccacatggcaac

SEQ ID NO: 37612 - DNA, 20 bp, Artificial Sequence
  Synthetic
cacacacacctgttgccatg

SEQ ID NO: 37613 - DNA, 20 bp, Artificial Sequence
  Synthetic
tgttctgttttccaggttta

SEQ ID NO: 37614 - DNA, 20 bp, Artificial Sequence
  Synthetic
ctgttttccaggtttatggt

SEQ ID NO: 37615 - DNA, 20 bp, Artificial Sequence
  Synthetic
tccaggtttatggttggctg

SEQ ID NO: 37616 - DNA, 20 bp, Artificial Sequence
  Synthetic
cccacagccaaccataaacc

SEQ ID NO: 37617 - DNA, 20 bp, Artificial Sequence
  Synthetic
ccaggtttatggttggctgt

SEQ ID NO: 37618 - DNA, 20 bp, Artificial Sequence
  Synthetic
gctgtgggagatgtgatgac

SEQ ID NO: 37619 - DNA, 20 bp, Artificial Sequence
  Synthetic
agatgtgatgactggtttca

SEQ ID NO: 37620 - DNA, 20 bp, Artificial Sequence
  Synthetic
tggtttcatggtgattgtgt

SEQ ID NO: 37621 - DNA, 20 bp, Artificial Sequence
  Synthetic
ggtttcatggtgattgtgtt

SEQ ID NO: 37622 - DNA, 20 bp, Artificial Sequence
  Synthetic
tctttctcaagcacagcaga

SEQ ID NO: 37623 - DNA, 20 bp, Artificial Sequence
  Synthetic
ctttctcaagcacagcagat

SEQ ID NO: 37624 - DNA, 20 bp, Artificial Sequence
  Synthetic
tcaagcacagcagatgggcg

SEQ ID NO: 37625 - DNA, 20 bp, Artificial Sequence
  Synthetic
tgccggtgtattgcctctgc

SEQ ID NO: 37626 - DNA, 20 bp, Artificial Sequence
  Synthetic
catcgtaaggcagccggcag

SEQ ID NO: 37627 - DNA, 20 bp, Artificial Sequence
  Synthetic
gggtcacatcgtaaggcagc

SEQ ID NO: 37628 - DNA, 20 bp, Artificial Sequence
  Synthetic
atgaagcgggtcacatcgta

SEQ ID NO: 37629 - DNA, 20 bp, Artificial Sequence
  Synthetic
gtcacactcgatcatgaagc

SEQ ID NO: 37630 - DNA, 20 bp, Artificial Sequence
  Synthetic
tgtcacactcgatcatgaag

SEQ ID NO: 37631 - DNA, 20 bp, Artificial Sequence
  Synthetic
gatcgagtgtgacatgtgcc

SEQ ID NO: 37632 - DNA, 20 bp, Artificial Sequence
  Synthetic
agtgtgacatgtgccaggac

SEQ ID NO: 37633 - DNA, 20 bp, Artificial Sequence
  Synthetic
atgtgccaggactggtttca

SEQ ID NO: 37634 - DNA, 20 bp, Artificial Sequence
  Synthetic
gccaggactggtttcatggc

SEQ ID NO: 37635 - DNA, 20 bp, Artificial Sequence
  Synthetic
acctgccatgaaaccagtcc

SEQ ID NO: 37636 - DNA, 20 bp, Artificial Sequence
  Synthetic
tttctctttttcagttgtgt

SEQ ID NO: 37637 - DNA, 20 bp, Artificial Sequence
  Synthetic
cagttgtgttggtgttgaag

SEQ ID NO: 37638 - DNA, 20 bp, Artificial Sequence
  Synthetic
tgttggtgttgaagaggaga

SEQ ID NO: 37639 - DNA, 20 bp, Artificial Sequence
  Synthetic
cacagttggggcagtggtag

SEQ ID NO: 37640 - DNA, 20 bp, Artificial Sequence
  Synthetic
agacttcacagttggggcag

SEQ ID NO: 37641 - DNA, 20 bp, Artificial Sequence
  Synthetic
catgcaagacttcacagttg

SEQ ID NO: 37642 - DNA, 20 bp, Artificial Sequence
  Synthetic
ccatgcaagacttcacagtt

SEQ ID NO: 37643 - DNA, 20 bp, Artificial Sequence
  Synthetic
cccatgcaagacttcacagt

SEQ ID NO: 37644 - DNA, 20 bp, Artificial Sequence
  Synthetic
agctatctcgcacactcatg

SEQ ID NO: 37645 - DNA, 20 bp, Artificial Sequence
  Synthetic
acagactttcacattgactt

SEQ ID NO: 37646 - DNA, 20 bp, Artificial Sequence
  Synthetic
gactttcacattgactttgg

SEQ ID NO: 37647 - DNA, 20 bp, Artificial Sequence
  Synthetic
actttggtggcacctctgtc

SEQ ID NO: 37648 - DNA, 20 bp, Artificial Sequence
  Synthetic
gagtacatggtaccagacag

SEQ ID NO: 37649 - DNA, 20 bp, Artificial Sequence
  Synthetic
tgtctggtaccatgtactca

SEQ ID NO: 37650 - DNA, 20 bp, Artificial Sequence
  Synthetic
tggtaccatgtactcaaggt

SEQ ID NO: 37651 - DNA, 20 bp, Artificial Sequence
  Synthetic
gcattcctaccttgagtaca

SEQ ID NO: 37652 - DNA, 20 bp, Artificial Sequence
  Synthetic
tggcatttgttgggcggatc

SEQ ID NO: 37653 - DNA, 20 bp, Artificial Sequence
  Synthetic
tcagattggcatttgttggg

SEQ ID NO: 37654 - DNA, 20 bp, Artificial Sequence
  Synthetic
gagtcagattggcatttgtt

SEQ ID NO: 37655 - DNA, 20 bp, Artificial Sequence
  Synthetic
agagtcagattggcatttgt

SEQ ID NO: 37656 - DNA, 20 bp, Artificial Sequence
  Synthetic
gcactcaaagagagtcagat

SEQ ID NO: 37657 - DNA, 20 bp, Artificial Sequence
  Synthetic
atctgactctctttgagtgc

SEQ ID NO: 37658 - DNA, 20 bp, Artificial Sequence
  Synthetic
gaacatctcattctgattag

SEQ ID NO: 37659 - DNA, 20 bp, Artificial Sequence
  Synthetic
aatcagaatgagatgttctt

SEQ ID NO: 37660 - DNA, 20 bp, Artificial Sequence
  Synthetic
atcagaatgagatgttcttt

SEQ ID NO: 37661 - DNA, 20 bp, Artificial Sequence
  Synthetic
tcagaatgagatgttctttg

SEQ ID NO: 37662 - DNA, 20 bp, Artificial Sequence
  Synthetic
tgagatgttctttggggacc

SEQ ID NO: 37663 - DNA, 20 bp, Artificial Sequence
  Synthetic
gatgttctttggggaccagg

SEQ ID NO: 37664 - DNA, 20 bp, Artificial Sequence
  Synthetic
acttgtagcacttgtccacc

SEQ ID NO: 37665 - DNA, 20 bp, Artificial Sequence
  Synthetic
tacaagtgttccgtgaagca

SEQ ID NO: 37666 - DNA, 20 bp, Artificial Sequence
  Synthetic
aagtgtctgtccttgcttca

SEQ ID NO: 37667 - DNA, 20 bp, Artificial Sequence
  Synthetic
cagacacttttcattcccac

SEQ ID NO: 37668 - DNA, 20 bp, Artificial Sequence
  Synthetic
gcacccaagggaagacctgt

SEQ ID NO: 37669 - DNA, 20 bp, Artificial Sequence
  Synthetic
agcacccaagggaagacctg

SEQ ID NO: 37670 - DNA, 20 bp, Artificial Sequence
  Synthetic
ccacaggcgtcagcacagca

SEQ ID NO: 37671 - DNA, 20 bp, Artificial Sequence
  Synthetic
ccatgctgtgctgacgcctg

SEQ ID NO: 37672 - DNA, 20 bp, Artificial Sequence
  Synthetic
ccaaaggcaaggcagtccac

SEQ ID NO: 37673 - DNA, 20 bp, Artificial Sequence
  Synthetic
cctgtggactgccttgcctt

SEQ ID NO: 37674 - DNA, 20 bp, Artificial Sequence
  Synthetic
gtggactgccttgcctttgg

SEQ ID NO: 37675 - DNA, 20 bp, Artificial Sequence
  Synthetic
tggactgccttgcctttgga

SEQ ID NO: 37676 - DNA, 20 bp, Artificial Sequence
  Synthetic
agaagttccctccaaaggca

SEQ ID NO: 37677 - DNA, 20 bp, Artificial Sequence
  Synthetic
gtgtaagaagttccctccaa

SEQ ID NO: 37678 - DNA, 20 bp, Artificial Sequence
  Synthetic
ttcagagcctttccgtcagc

SEQ ID NO: 37679 - DNA, 20 bp, Artificial Sequence
  Synthetic
agatctaccggctgacggaa

SEQ ID NO: 37680 - DNA, 20 bp, Artificial Sequence
  Synthetic
caaggagatctaccggctga

SEQ ID NO: 37681 - DNA, 20 bp, Artificial Sequence
  Synthetic
ggatattcaaggagatctac

SEQ ID NO: 37682 - DNA, 20 bp, Artificial Sequence
  Synthetic
aaatacttactggatattca

SEQ ID NO: 37683 - DNA, 20 bp, Artificial Sequence
  Synthetic
agacatcattgacactccaa

SEQ ID NO: 37684 - DNA, 20 bp, Artificial Sequence
  Synthetic
ctaacggtagcaaaatccat

SEQ ID NO: 37685 - DNA, 20 bp, Artificial Sequence
  Synthetic
taccgttagagaaactttag

SEQ ID NO: 37686 - DNA, 20 bp, Artificial Sequence
  Synthetic
agcctctaaagtttctctaa

SEQ ID NO: 37687 - DNA, 20 bp, Artificial Sequence
  Synthetic
gttagagaaactttagaggc

SEQ ID NO: 37688 - DNA, 20 bp, Artificial Sequence
  Synthetic
ttagagaaactttagaggct

SEQ ID NO: 37689 - DNA, 20 bp, Artificial Sequence
  Synthetic
tgggaattatgagtcaccaa

SEQ ID NO: 37690 - DNA, 20 bp, Artificial Sequence
  Synthetic
acatctttacataactccat

SEQ ID NO: 37691 - DNA, 20 bp, Artificial Sequence
  Synthetic
tttgcttggtgtatatgctt

SEQ ID NO: 37692 - DNA, 20 bp, Artificial Sequence
  Synthetic
atacaccaagcaaaagatca

SEQ ID NO: 37693 - DNA, 20 bp, Artificial Sequence
  Synthetic
tacaccaagcaaaagatcaa

SEQ ID NO: 37694 - DNA, 20 bp, Artificial Sequence
  Synthetic
tatacccttgatcttttgct

SEQ ID NO: 37695 - DNA, 20 bp, Artificial Sequence
  Synthetic
tgaagaatgtgaaagaattg

SEQ ID NO: 37696 - DNA, 20 bp, Artificial Sequence
  Synthetic
gaatgtgaaagaattgtggc

SEQ ID NO: 37697 - DNA, 20 bp, Artificial Sequence
  Synthetic
ataaaccagttgatgacact

SEQ ID NO: 37698 - DNA, 20 bp, Artificial Sequence
  Synthetic
acttacctagtgtcatcaac

SEQ ID NO: 37699 - DNA, 20 bp, Artificial Sequence
  Synthetic
agatattgcctcagcatttg

SEQ ID NO: 37700 - DNA, 20 bp, Artificial Sequence
  Synthetic
cacgggggccacaaatgctg

SEQ ID NO: 37701 - DNA, 20 bp, Artificial Sequence
  Synthetic
ctcagcatttgtggcccccg

SEQ ID NO: 37702 - DNA, 20 bp, Artificial Sequence
  Synthetic
ataggcttgcagatccacgg

SEQ ID NO: 37703 - DNA, 20 bp, Artificial Sequence
  Synthetic
gataggcttgcagatccacg

SEQ ID NO: 37704 - DNA, 20 bp, Artificial Sequence
  Synthetic
ggataggcttgcagatccac

SEQ ID NO: 37705 - DNA, 20 bp, Artificial Sequence
  Synthetic
gggataggcttgcagatcca

SEQ ID NO: 37706 - DNA, 20 bp, Artificial Sequence
  Synthetic
tactgtgcaatacatgggat

SEQ ID NO: 37707 - DNA, 20 bp, Artificial Sequence
  Synthetic
tcccatgtattgcacagtag

SEQ ID NO: 37708 - DNA, 20 bp, Artificial Sequence
  Synthetic
gccactactgtgcaatacat

SEQ ID NO: 37709 - DNA, 20 bp, Artificial Sequence
  Synthetic
tgccactactgtgcaataca

SEQ ID NO: 37710 - DNA, 20 bp, Artificial Sequence
  Synthetic
cacagtagtggcatatccaa

SEQ ID NO: 37711 - DNA, 20 bp, Artificial Sequence
  Synthetic
ttaattgtacttagatccgt

SEQ ID NO: 37712 - DNA, 20 bp, Artificial Sequence
  Synthetic
aagtacaattaaacaaagac

SEQ ID NO: 37713 - DNA, 20 bp, Artificial Sequence
  Synthetic
ttaaacaaagactggaaaac

SEQ ID NO: 37714 - DNA, 20 bp, Artificial Sequence
  Synthetic
gactggaaaacaggttttac

SEQ ID NO: 37715 - DNA, 20 bp, Artificial Sequence
  Synthetic
ggcgggtttcttccctaatg

SEQ ID NO: 37716 - DNA, 20 bp, Artificial Sequence
  Synthetic
gcgggtttcttccctaatgt

SEQ ID NO: 37717 - DNA, 20 bp, Artificial Sequence
  Synthetic
atatcgaacttcccacatta

SEQ ID NO: 37718 - DNA, 20 bp, Artificial Sequence
  Synthetic
tatatcgaacttcccacatt

SEQ ID NO: 37719 - DNA, 20 bp, Artificial Sequence
  Synthetic
acacgaacatttaatgagcc

SEQ ID NO: 37720 - DNA, 20 bp, Artificial Sequence
  Synthetic
gatttcacaatagggcttcc

SEQ ID NO: 37721 - DNA, 20 bp, Artificial Sequence
  Synthetic
atttagcagatttcacaata

SEQ ID NO: 37722 - DNA, 20 bp, Artificial Sequence
  Synthetic
aatttagcagatttcacaat

SEQ ID NO: 37723 - DNA, 20 bp, Artificial Sequence
  Synthetic
aggttgttagctaccttaag

SEQ ID NO: 37724 - DNA, 20 bp, Artificial Sequence
  Synthetic
ttcagcagcatgtcctctta

SEQ ID NO: 37725 - DNA, 20 bp, Artificial Sequence
  Synthetic
tgctgctgaaatatcagaca

SEQ ID NO: 37726 - DNA, 20 bp, Artificial Sequence
  Synthetic
gagaataccatgatagcagc

SEQ ID NO: 37727 - DNA, 20 bp, Artificial Sequence
  Synthetic
acaacttccagctgctatca

SEQ ID NO: 37728 - DNA, 20 bp, Artificial Sequence
  Synthetic
gtgataaaatgatccgagtc

SEQ ID NO: 37729 - DNA, 20 bp, Artificial Sequence
  Synthetic
aggttcgaagacaccagact

SEQ ID NO: 37730 - DNA, 20 bp, Artificial Sequence
  Synthetic
gccagagaaaatatcagaat

SEQ ID NO: 37731 - DNA, 20 bp, Artificial Sequence
  Synthetic
tgttactagtgttggaaaac

SEQ ID NO: 37732 - DNA, 20 bp, Artificial Sequence
  Synthetic
agttttccaacactagtaac

SEQ ID NO: 37733 - DNA, 20 bp, Artificial Sequence
  Synthetic
attttacctgttactagtgt

SEQ ID NO: 37734 - DNA, 20 bp, Artificial Sequence
  Synthetic
ttttaatacaggtttgtaag

SEQ ID NO: 37735 - DNA, 20 bp, Artificial Sequence
  Synthetic
tttgtaagtggcagtcgtga

SEQ ID NO: 37736 - DNA, 20 bp, Artificial Sequence
  Synthetic
ttgtaagtggcagtcgtgat

SEQ ID NO: 37737 - DNA, 20 bp, Artificial Sequence
  Synthetic
gtgatgggacagcacgtatt

SEQ ID NO: 37738 - DNA, 20 bp, Artificial Sequence
  Synthetic
aaaatgcataaacgaattct

SEQ ID NO: 37739 - DNA, 20 bp, Artificial Sequence
  Synthetic
tgtgtaacttttgatcgaac

SEQ ID NO: 37740 - DNA, 20 bp, Artificial Sequence
  Synthetic
cttttgatcgaactggcaga

SEQ ID NO: 37741 - DNA, 20 bp, Artificial Sequence
  Synthetic
atgactgtcttgtgaaaata

SEQ ID NO: 37742 - DNA, 20 bp, Artificial Sequence
  Synthetic
tgactgtcttgtgaaaatat

SEQ ID NO: 37743 - DNA, 20 bp, Artificial Sequence
  Synthetic
tcaactaattcatgtcctga

SEQ ID NO: 37744 - DNA, 20 bp, Artificial Sequence
  Synthetic
tagaattttttctcaccatc

SEQ ID NO: 37745 - DNA, 20 bp, Artificial Sequence
  Synthetic
atttcagggtcatgaagatg

SEQ ID NO: 37746 - DNA, 20 bp, Artificial Sequence
  Synthetic
actctaggatcgaacgggtg

SEQ ID NO: 37747 - DNA, 20 bp, Artificial Sequence
  Synthetic
agagaactctaggatcgaac

SEQ ID NO: 37748 - DNA, 20 bp, Artificial Sequence
  Synthetic
aagagaactctaggatcgaa

SEQ ID NO: 37749 - DNA, 20 bp, Artificial Sequence
  Synthetic
ccagcagaaaagagaactct

SEQ ID NO: 37750 - DNA, 20 bp, Artificial Sequence
  Synthetic
cctagagttctcttttctgc

SEQ ID NO: 37751 - DNA, 20 bp, Artificial Sequence
  Synthetic
ctcttttctgctggtcatga

SEQ ID NO: 37752 - DNA, 20 bp, Artificial Sequence
  Synthetic
atgatggaaacgtgatagtg

SEQ ID NO: 37753 - DNA, 20 bp, Artificial Sequence
  Synthetic
tgatggaaacgtgatagtgt

SEQ ID NO: 37754 - DNA, 20 bp, Artificial Sequence
  Synthetic
aaacgtgatagtgtgggatc

SEQ ID NO: 37755 - DNA, 20 bp, Artificial Sequence
  Synthetic
tcttcgaacctgtgcacctt

SEQ ID NO: 37756 - DNA, 20 bp, Artificial Sequence
  Synthetic
tgcacctttggctgttcttc

SEQ ID NO: 37757 - DNA, 20 bp, Artificial Sequence
  Synthetic
gcacctttggctgttcttca

SEQ ID NO: 37758 - DNA, 20 bp, Artificial Sequence
  Synthetic
tggccctgaagaacagccaa

SEQ ID NO: 37759 - DNA, 20 bp, Artificial Sequence
  Synthetic
gtgatgtaatagatgcacta

SEQ ID NO: 37760 - DNA, 20 bp, Artificial Sequence
  Synthetic
tgcatctattacatcactac

SEQ ID NO: 37761 - DNA, 20 bp, Artificial Sequence
  Synthetic
cagttctcaccattgtgcag

SEQ ID NO: 37762 - DNA, 20 bp, Artificial Sequence
  Synthetic
ctctttgagccactgcacaa

SEQ ID NO: 37763 - DNA, 20 bp, Artificial Sequence
  Synthetic
aagagatatctatcttctac

SEQ ID NO: 37764 - DNA, 20 bp, Artificial Sequence
  Synthetic
agagatatctatcttctact

SEQ ID NO: 37765 - DNA, 20 bp, Artificial Sequence
  Synthetic
gagatatctatcttctactg

SEQ ID NO: 37766 - DNA, 20 bp, Artificial Sequence
  Synthetic
ctatcttctactggggcaga

SEQ ID NO: 37767 - DNA, 20 bp, Artificial Sequence
  Synthetic
cagatggcactatttgtttt

SEQ ID NO: 37768 - DNA, 20 bp, Artificial Sequence
  Synthetic
ggaggacccgaccttctgtg

SEQ ID NO: 37769 - DNA, 20 bp, Artificial Sequence
  Synthetic
ccgaccttctgtgaggtgtg

SEQ ID NO: 37770 - DNA, 20 bp, Artificial Sequence
  Synthetic
cctgccgcacacctcacaga

SEQ ID NO: 37771 - DNA, 20 bp, Artificial Sequence
  Synthetic
ccttctgtgaggtgtgcggc

SEQ ID NO: 37772 - DNA, 20 bp, Artificial Sequence
  Synthetic
gtgcggcaggagcgaccgtg

SEQ ID NO: 37773 - DNA, 20 bp, Artificial Sequence
  Synthetic
gcaggagcgaccgtgaggac

SEQ ID NO: 37774 - DNA, 20 bp, Artificial Sequence
  Synthetic
agagcaaaagcctgtcctca

SEQ ID NO: 37775 - DNA, 20 bp, Artificial Sequence
  Synthetic
gacaggcttttgctctgcga

SEQ ID NO: 37776 - DNA, 20 bp, Artificial Sequence
  Synthetic
gctctgcgacggctgcgatg

SEQ ID NO: 37777 - DNA, 20 bp, Artificial Sequence
  Synthetic
ctctgcgacggctgcgatgc

SEQ ID NO: 37778 - DNA, 20 bp, Artificial Sequence
  Synthetic
tctgcgacggctgcgatgcg

SEQ ID NO: 37779 - DNA, 20 bp, Artificial Sequence
  Synthetic
tctctcctgtaggtaccaca

SEQ ID NO: 37780 - DNA, 20 bp, Artificial Sequence
  Synthetic
taggtaccacatggaatgct

SEQ ID NO: 37781 - DNA, 20 bp, Artificial Sequence
  Synthetic
gggggtccaagcattccatg

SEQ ID NO: 37782 - DNA, 20 bp, Artificial Sequence
  Synthetic
atgcttggacccccctctcc

SEQ ID NO: 37783 - DNA, 20 bp, Artificial Sequence
  Synthetic
cttggacccccctctccagg

SEQ ID NO: 37784 - DNA, 20 bp, Artificial Sequence
  Synthetic
ccggcacctcctggagaggg

SEQ ID NO: 37785 - DNA, 20 bp, Artificial Sequence
  Synthetic
cccccctctccaggaggtgc

SEQ ID NO: 37786 - DNA, 20 bp, Artificial Sequence
  Synthetic
accggcacctcctggagagg

SEQ ID NO: 37787 - DNA, 20 bp, Artificial Sequence
  Synthetic
caccggcacctcctggagag

SEQ ID NO: 37788 - DNA, 20 bp, Artificial Sequence
  Synthetic
ccaccggcacctcctggaga

SEQ ID NO: 37789 - DNA, 20 bp, Artificial Sequence
  Synthetic
ccctctccaggaggtgccgg

SEQ ID NO: 37790 - DNA, 20 bp, Artificial Sequence
  Synthetic
tccaccggcacctcctggag

SEQ ID NO: 37791 - DNA, 20 bp, Artificial Sequence
  Synthetic
actcgtccaccggcacctcc

SEQ ID NO: 37792 - DNA, 20 bp, Artificial Sequence
  Synthetic
aggaggtgccggtggacgag

SEQ ID NO: 37793 - DNA, 20 bp, Artificial Sequence
  Synthetic
gggcagaaccactcgtccac

SEQ ID NO: 37794 - DNA, 20 bp, Artificial Sequence
  Synthetic
ggtggacgagtggttctgcc

SEQ ID NO: 37795 - DNA, 20 bp, Artificial Sequence
  Synthetic
caccaggcgcagcacattcc

SEQ ID NO: 37796 - DNA, 20 bp, Artificial Sequence
  Synthetic
acaccaggcgcagcacattc

SEQ ID NO: 37797 - DNA, 20 bp, Artificial Sequence
  Synthetic
gagtaaagaatacataccaa

SEQ ID NO: 37798 - DNA, 20 bp, Artificial Sequence
  Synthetic
agtaaagaatacataccaaa

SEQ ID NO: 37799 - DNA, 20 bp, Artificial Sequence
  Synthetic
ataccaaagggcacacgttt

SEQ ID NO: 37800 - DNA, 20 bp, Artificial Sequence
  Synthetic
ggtccaaaacgtgtgccctt

SEQ ID NO: 37801 - DNA, 20 bp, Artificial Sequence
  Synthetic
acacgttttggacccctaat

SEQ ID NO: 37802 - DNA, 20 bp, Artificial Sequence
  Synthetic
gtgtagatttcacctattag

SEQ ID NO: 37803 - DNA, 20 bp, Artificial Sequence
  Synthetic
ggtgtagatttcacctatta

SEQ ID NO: 37804 - DNA, 20 bp, Artificial Sequence
  Synthetic
tggtgtagatttcacctatt

SEQ ID NO: 37805 - DNA, 20 bp, Artificial Sequence
  Synthetic
gttcttaggaactgtgtcat

SEQ ID NO: 37806 - DNA, 20 bp, Artificial Sequence
  Synthetic
cagttcctaagaacgccaac

SEQ ID NO: 37807 - DNA, 20 bp, Artificial Sequence
  Synthetic
tatttcctgttggcgttctt

SEQ ID NO: 37808 - DNA, 20 bp, Artificial Sequence
  Synthetic
acgccaacaggaaatatttt

SEQ ID NO: 37809 - DNA, 20 bp, Artificial Sequence
  Synthetic
cctccaaaaatatttcctgt

SEQ ID NO: 37810 - DNA, 20 bp, Artificial Sequence
  Synthetic
ccaacaggaaatatttttgg

SEQ ID NO: 37811 - DNA, 20 bp, Artificial Sequence
  Synthetic
caacaggaaatatttttgga

SEQ ID NO: 37812 - DNA, 20 bp, Artificial Sequence
  Synthetic
tttggacagatctattccag

SEQ ID NO: 37813 - DNA, 20 bp, Artificial Sequence
  Synthetic
ttggacagatctattccaga

SEQ ID NO: 37814 - DNA, 20 bp, Artificial Sequence
  Synthetic
tggacagatctattccagag

SEQ ID NO: 37815 - DNA, 20 bp, Artificial Sequence
  Synthetic
gaagtggtgaagctcccctc

SEQ ID NO: 37816 - DNA, 20 bp, Artificial Sequence
  Synthetic
gagcttcaccacttcattga

SEQ ID NO: 37817 - DNA, 20 bp, Artificial Sequence
  Synthetic
cattaaagccgtcaatgaag

SEQ ID NO: 37818 - DNA, 20 bp, Artificial Sequence
  Synthetic
ttaatgaagagaaaagcaac

SEQ ID NO: 37819 - DNA, 20 bp, Artificial Sequence
  Synthetic
tgaatccagcacactctccc

SEQ ID NO: 37820 - DNA, 20 bp, Artificial Sequence
  Synthetic
gaatccagcacactctcccc

SEQ ID NO: 37821 - DNA, 20 bp, Artificial Sequence
  Synthetic
tgctcccggggagagtgtgc

SEQ ID NO: 37822 - DNA, 20 bp, Artificial Sequence
  Synthetic
ctctccccgggagcaaaacc

SEQ ID NO: 37823 - DNA, 20 bp, Artificial Sequence
  Synthetic
gcagccaggttttgctcccg

SEQ ID NO: 37824 - DNA, 20 bp, Artificial Sequence
  Synthetic
cgcagccaggttttgctccc

SEQ ID NO: 37825 - DNA, 20 bp, Artificial Sequence
  Synthetic
acgcagccaggttttgctcc

SEQ ID NO: 37826 - DNA, 20 bp, Artificial Sequence
  Synthetic
aacctggctgcgtgtcagaa

SEQ ID NO: 37827 - DNA, 20 bp, Artificial Sequence
  Synthetic
acctggctgcgtgtcagaac

SEQ ID NO: 37828 - DNA, 20 bp, Artificial Sequence
  Synthetic
tcccgttctgacacgcagcc

SEQ ID NO: 37829 - DNA, 20 bp, Artificial Sequence
  Synthetic
gttggcagggatgggcttaa

SEQ ID NO: 37830 - DNA, 20 bp, Artificial Sequence
  Synthetic
taagcccatccctgccaacc

SEQ ID NO: 37831 - DNA, 20 bp, Artificial Sequence
  Synthetic
agttcctggttggcagggat

SEQ ID NO: 37832 - DNA, 20 bp, Artificial Sequence
  Synthetic
aagttcctggttggcaggga

SEQ ID NO: 37833 - DNA, 20 bp, Artificial Sequence
  Synthetic
caagaagttcctggttggca

SEQ ID NO: 37834 - DNA, 20 bp, Artificial Sequence
  Synthetic
acaagaagttcctggttggc

SEQ ID NO: 37835 - DNA, 20 bp, Artificial Sequence
  Synthetic
ccacacaagaagttcctggt

SEQ ID NO: 37836 - DNA, 20 bp, Artificial Sequence
  Synthetic
ccaaccaggaacttcttgtg

SEQ ID NO: 37837 - DNA, 20 bp, Artificial Sequence
  Synthetic
aataccacacaagaagttcc

SEQ ID NO: 37838 - DNA, 20 bp, Artificial Sequence
  Synthetic
tttccttcctaggagagaag

SEQ ID NO: 37839 - DNA, 20 bp, Artificial Sequence
  Synthetic
tgacgtgcgatgtgtaaacg

SEQ ID NO: 37840 - DNA, 20 bp, Artificial Sequence
  Synthetic
tgtaaacgaggtcatcccca

SEQ ID NO: 37841 - DNA, 20 bp, Artificial Sequence
  Synthetic
gtaaacgaggtcatccccaa

SEQ ID NO: 37842 - DNA, 20 bp, Artificial Sequence
  Synthetic
ggccgaagatgtggcccttg

SEQ ID NO: 37843 - DNA, 20 bp, Artificial Sequence
  Synthetic
gggccgaagatgtggccctt

SEQ ID NO: 37844 - DNA, 20 bp, Artificial Sequence
  Synthetic
ggggccgaagatgtggccct

SEQ ID NO: 37845 - DNA, 20 bp, Artificial Sequence
  Synthetic
atccccaagggccacatctt

SEQ ID NO: 37846 - DNA, 20 bp, Artificial Sequence
  Synthetic
cctcataggggccgaagatg

SEQ ID NO: 37847 - DNA, 20 bp, Artificial Sequence
  Synthetic
ccacatcttcggcccctatg

SEQ ID NO: 37848 - DNA, 20 bp, Artificial Sequence
  Synthetic
cacatcttcggcccctatga

SEQ ID NO: 37849 - DNA, 20 bp, Artificial Sequence
  Synthetic
tggagatctgcccctcatag

SEQ ID NO: 37850 - DNA, 20 bp, Artificial Sequence
  Synthetic
gtggagatctgcccctcata

SEQ ID NO: 37851 - DNA, 20 bp, Artificial Sequence
  Synthetic
acatcttcggcccctatgag

SEQ ID NO: 37852 - DNA, 20 bp, Artificial Sequence
  Synthetic
ggtggagatctgcccctcat

SEQ ID NO: 37853 - DNA, 20 bp, Artificial Sequence
  Synthetic
tgaggggcagatctccaccc

SEQ ID NO: 37854 - DNA, 20 bp, Artificial Sequence
  Synthetic
gccagctgatttgtcctggg

SEQ ID NO: 37855 - DNA, 20 bp, Artificial Sequence
  Synthetic
gaagccagctgatttgtcct

SEQ ID NO: 37856 - DNA, 20 bp, Artificial Sequence
  Synthetic
agaagccagctgatttgtcc

SEQ ID NO: 37857 - DNA, 20 bp, Artificial Sequence
  Synthetic
tccacccaggacaaatcagc

SEQ ID NO: 37858 - DNA, 20 bp, Artificial Sequence
  Synthetic
aatcagctggcttcttctcc

SEQ ID NO: 37859 - DNA, 20 bp, Artificial Sequence
  Synthetic
agctggcttcttctcctggc

SEQ ID NO: 37860 - DNA, 20 bp, Artificial Sequence
  Synthetic
ccagggcacactcaccagcc

SEQ ID NO: 37861 - DNA, 20 bp, Artificial Sequence
  Synthetic
tttctctttcttccagattg

SEQ ID NO: 37862 - DNA, 20 bp, Artificial Sequence
  Synthetic
ggttgttcttgtccacaatc

SEQ ID NO: 37863 - DNA, 20 bp, Artificial Sequence
  Synthetic
agccatctatggacttatag

SEQ ID NO: 37864 - DNA, 20 bp, Artificial Sequence
  Synthetic
aaccgctataagtccataga

SEQ ID NO: 37865 - DNA, 20 bp, Artificial Sequence
  Synthetic
ggtctcgtctgagccatcta

SEQ ID NO: 37866 - DNA, 20 bp, Artificial Sequence
  Synthetic
tcacctcatccagttggctt

SEQ ID NO: 37867 - DNA, 20 bp, Artificial Sequence
  Synthetic
cagacgagaccaaagccaac

SEQ ID NO: 37868 - DNA, 20 bp, Artificial Sequence
  Synthetic
cagggctcacctcatccagt

SEQ ID NO: 37869 - DNA, 20 bp, Artificial Sequence
  Synthetic
agaccaaagccaactggatg

SEQ ID NO: 37870 - DNA, 20 bp, Artificial Sequence
  Synthetic
tcccctccccaccaggtacg

SEQ ID NO: 37871 - DNA, 20 bp, Artificial Sequence
  Synthetic
ccgggagatgaccacgtacc

SEQ ID NO: 37872 - DNA, 20 bp, Artificial Sequence
  Synthetic
ccaggtacgtggtcatctcc

SEQ ID NO: 37873 - DNA, 20 bp, Artificial Sequence
  Synthetic
caggtacgtggtcatctccc

SEQ ID NO: 37874 - DNA, 20 bp, Artificial Sequence
  Synthetic
gtacgtggtcatctcccggg

SEQ ID NO: 37875 - DNA, 20 bp, Artificial Sequence
  Synthetic
gttctgctccctctcctccc

SEQ ID NO: 37876 - DNA, 20 bp, Artificial Sequence
  Synthetic
ggttctgctccctctcctcc

SEQ ID NO: 37877 - DNA, 20 bp, Artificial Sequence
  Synthetic
tggtcatctcccgggaggag

SEQ ID NO: 37878 - DNA, 20 bp, Artificial Sequence
  Synthetic
ggtcatctcccgggaggaga

SEQ ID NO: 37879 - DNA, 20 bp, Artificial Sequence
  Synthetic
ggagagggagcagaacctgc

SEQ ID NO: 37880 - DNA, 20 bp, Artificial Sequence
  Synthetic
cactgtgctggaacgccagc

SEQ ID NO: 37881 - DNA, 20 bp, Artificial Sequence
  Synthetic
agtagatgcgctcactgtgc

SEQ ID NO: 37882 - DNA, 20 bp, Artificial Sequence
  Synthetic
acagtgagcgcatctacttc

SEQ ID NO: 37883 - DNA, 20 bp, Artificial Sequence
  Synthetic
cagtgagcgcatctacttcc

SEQ ID NO: 37884 - DNA, 20 bp, Artificial Sequence
  Synthetic
gccggatgtccctgcacgcc

SEQ ID NO: 37885 - DNA, 20 bp, Artificial Sequence
  Synthetic
gcatctacttccgggcgtgc

SEQ ID NO: 37886 - DNA, 20 bp, Artificial Sequence
  Synthetic
catctacttccgggcgtgca

SEQ ID NO: 37887 - DNA, 20 bp, Artificial Sequence
  Synthetic
tccgggcgtgcagggacatc

SEQ ID NO: 37888 - DNA, 20 bp, Artificial Sequence
  Synthetic
gcgtgcagggacatccggcc

SEQ ID NO: 37889 - DNA, 20 bp, Artificial Sequence
  Synthetic
cgtgcagggacatccggcct

SEQ ID NO: 37890 - DNA, 20 bp, Artificial Sequence
  Synthetic
gtgcagggacatccggcctg

SEQ ID NO: 37891 - DNA, 20 bp, Artificial Sequence
  Synthetic
cccgcagccactccccaggc

SEQ ID NO: 37892 - DNA, 20 bp, Artificial Sequence
  Synthetic
cagacccgcagccactcccc

SEQ ID NO: 37893 - DNA, 20 bp, Artificial Sequence
  Synthetic
gggacatccggcctggggag

SEQ ID NO: 37894 - DNA, 20 bp, Artificial Sequence
  Synthetic
tccggcctggggagtggctg

SEQ ID NO: 37895 - DNA, 20 bp, Artificial Sequence
  Synthetic
ccggcctggggagtggctgc

SEQ ID NO: 37896 - DNA, 20 bp, Artificial Sequence
  Synthetic
ctggggagtggctgcgggtc

SEQ ID NO: 37897 - DNA, 20 bp, Artificial Sequence
  Synthetic
gctgcgggtctggtacagcg

SEQ ID NO: 37898 - DNA, 20 bp, Artificial Sequence
  Synthetic
tttcctgggacatgctgtgc

SEQ ID NO: 37899 - DNA, 20 bp, Artificial Sequence
  Synthetic
gcgcctgcacagcatgtccc

SEQ ID NO: 37900 - DNA, 20 bp, Artificial Sequence
  Synthetic
gttgcggtgaatggtttcct

SEQ ID NO: 37901 - DNA, 20 bp, Artificial Sequence
  Synthetic
ggttgcggtgaatggtttcc

SEQ ID NO: 37902 - DNA, 20 bp, Artificial Sequence
  Synthetic
tctggccaggttgcggtgaa

SEQ ID NO: 37903 - DNA, 20 bp, Artificial Sequence
  Synthetic
ggaaaccattcaccgcaacc

SEQ ID NO: 37904 - DNA, 20 bp, Artificial Sequence
  Synthetic
actcacctctggccaggttg

SEQ ID NO: 37905 - DNA, 20 bp, Artificial Sequence
  Synthetic
attcaccgcaacctggccag

SEQ ID NO: 37906 - DNA, 20 bp, Artificial Sequence
  Synthetic
catggcactcacctctggcc

SEQ ID NO: 37907 - DNA, 20 bp, Artificial Sequence
  Synthetic
tggagcatggcactcacctc

SEQ ID NO: 37908 - DNA, 20 bp, Artificial Sequence
  Synthetic
taggagagaagaggttgcag

SEQ ID NO: 37909 - DNA, 20 bp, Artificial Sequence
  Synthetic
aggagagaagaggttgcaga

SEQ ID NO: 37910 - DNA, 20 bp, Artificial Sequence
  Synthetic
gcagagggagaagtctgagc

SEQ ID NO: 37911 - DNA, 20 bp, Artificial Sequence
  Synthetic
ggagaagtctgagcaggttc

SEQ ID NO: 37912 - DNA, 20 bp, Artificial Sequence
  Synthetic
tgcagtagttttatcgccaa

SEQ ID NO: 37913 - DNA, 20 bp, Artificial Sequence
  Synthetic
gttttatcgccaaaggagtc

SEQ ID NO: 37914 - DNA, 20 bp, Artificial Sequence
  Synthetic
atcgccaaaggagtcaggtt

SEQ ID NO: 37915 - DNA, 20 bp, Artificial Sequence
  Synthetic
tcgccaaaggagtcaggttt

SEQ ID NO: 37916 - DNA, 20 bp, Artificial Sequence
  Synthetic
gggcccaaacctgactcctt

SEQ ID NO: 37917 - DNA, 20 bp, Artificial Sequence
  Synthetic
gtcaggtttgggccctttca

SEQ ID NO: 37918 - DNA, 20 bp, Artificial Sequence
  Synthetic
tgggccctttcaaggtaaag

SEQ ID NO: 37919 - DNA, 20 bp, Artificial Sequence
  Synthetic
ttgaccactttaccttgaaa

SEQ ID NO: 37920 - DNA, 20 bp, Artificial Sequence
  Synthetic
attgaccactttaccttgaa

SEQ ID NO: 37921 - DNA, 20 bp, Artificial Sequence
  Synthetic
gccagtgaagtgaagaccta

SEQ ID NO: 37922 - DNA, 20 bp, Artificial Sequence
  Synthetic
tccgtaggtcttcacttcac

SEQ ID NO: 37923 - DNA, 20 bp, Artificial Sequence
  Synthetic
catcacagaattgtctccgt

SEQ ID NO: 37924 - DNA, 20 bp, Artificial Sequence
  Synthetic
acggagacaattctgtgatg

SEQ ID NO: 37925 - DNA, 20 bp, Artificial Sequence
  Synthetic
cggagacaattctgtgatgt

SEQ ID NO: 37926 - DNA, 20 bp, Artificial Sequence
  Synthetic
agacaattctgtgatgtggg

SEQ ID NO: 37927 - DNA, 20 bp, Artificial Sequence
  Synthetic
ttcatttagatctttgaaga

SEQ ID NO: 37928 - DNA, 20 bp, Artificial Sequence
  Synthetic
catttgagccactttataga

SEQ ID NO: 37929 - DNA, 20 bp, Artificial Sequence
  Synthetic
agccactttatagatggaaa

SEQ ID NO: 37930 - DNA, 20 bp, Artificial Sequence
  Synthetic
ctccttttccatctataaag

SEQ ID NO: 37931 - DNA, 20 bp, Artificial Sequence
  Synthetic
cactttatagatggaaaagg

SEQ ID NO: 37932 - DNA, 20 bp, Artificial Sequence
  Synthetic
tatagatggaaaaggaggta

SEQ ID NO: 37933 - DNA, 20 bp, Artificial Sequence
  Synthetic
atagatggaaaaggaggtac

SEQ ID NO: 37934 - DNA, 20 bp, Artificial Sequence
  Synthetic
tagatggaaaaggaggtacg

SEQ ID NO: 37935 - DNA, 20 bp, Artificial Sequence
  Synthetic
gaaaaggaggtacggggaac

SEQ ID NO: 37936 - DNA, 20 bp, Artificial Sequence
  Synthetic
gaagcgggcacagttgacat

SEQ ID NO: 37937 - DNA, 20 bp, Artificial Sequence
  Synthetic
caactgtgcccgcttcccca

SEQ ID NO: 37938 - DNA, 20 bp, Artificial Sequence
  Synthetic
gttctgctccttggggaagc

SEQ ID NO: 37939 - DNA, 20 bp, Artificial Sequence
  Synthetic
ggttctgctccttggggaag

SEQ ID NO: 37940 - DNA, 20 bp, Artificial Sequence
  Synthetic
caactaggttctgctccttg

SEQ ID NO: 37941 - DNA, 20 bp, Artificial Sequence
  Synthetic
gcaactaggttctgctcctt

SEQ ID NO: 37942 - DNA, 20 bp, Artificial Sequence
  Synthetic
agcaactaggttctgctcct

SEQ ID NO: 37943 - DNA, 20 bp, Artificial Sequence
  Synthetic
cttgacactgcacagcaact

SEQ ID NO: 37944 - DNA, 20 bp, Artificial Sequence
  Synthetic
ctagttgctgtgcagtgtca

SEQ ID NO: 37945 - DNA, 20 bp, Artificial Sequence
  Synthetic
tagttgctgtgcagtgtcaa

SEQ ID NO: 37946 - DNA, 20 bp, Artificial Sequence
  Synthetic
caaggagctcttggttctga

SEQ ID NO: 37947 - DNA, 20 bp, Artificial Sequence
  Synthetic
agaaccaagagctccttgtg

SEQ ID NO: 37948 - DNA, 20 bp, Artificial Sequence
  Synthetic
cataccacacaaggagctct

SEQ ID NO: 37949 - DNA, 20 bp, Artificial Sequence
  Synthetic
caagagctccttgtgtggta

SEQ ID NO: 37950 - DNA, 20 bp, Artificial Sequence
  Synthetic
agcagtctccataccacaca

SEQ ID NO: 37951 - DNA, 20 bp, Artificial Sequence
  Synthetic
tgatgccactgatccagaga

SEQ ID NO: 37952 - DNA, 20 bp, Artificial Sequence
  Synthetic
gatgccactgatccagagaa

SEQ ID NO: 37953 - DNA, 20 bp, Artificial Sequence
  Synthetic
ctgatccagagaagggaaac

SEQ ID NO: 37954 - DNA, 20 bp, Artificial Sequence
  Synthetic
cgcagccagtttcccttctc

SEQ ID NO: 37955 - DNA, 20 bp, Artificial Sequence
  Synthetic
actggctgcgatatgtgaat

SEQ ID NO: 37956 - DNA, 20 bp, Artificial Sequence
  Synthetic
ctggctgcgatatgtgaatt

SEQ ID NO: 37957 - DNA, 20 bp, Artificial Sequence
  Synthetic
tatgtgaattgggcttgctc

SEQ ID NO: 37958 - DNA, 20 bp, Artificial Sequence
  Synthetic
agagcaaaatttattcccac

SEQ ID NO: 37959 - DNA, 20 bp, Artificial Sequence
  Synthetic
tggctctgttgatttccagt

SEQ ID NO: 37960 - DNA, 20 bp, Artificial Sequence
  Synthetic
atggctctgttgatttccag

SEQ ID NO: 37961 - DNA, 20 bp, Artificial Sequence
  Synthetic
ctttaaagttttatagtaaa

SEQ ID NO: 37962 - DNA, 20 bp, Artificial Sequence
  Synthetic
catttactataaaactttaa

SEQ ID NO: 37963 - DNA, 20 bp, Artificial Sequence
  Synthetic
ctccccgcagccaatcgcgc

SEQ ID NO: 37964 - DNA, 20 bp, Artificial Sequence
  Synthetic
tccccgcagccaatcgcgcc

SEQ ID NO: 37965 - DNA, 20 bp, Artificial Sequence
  Synthetic
gcagccaatcgcgccgggcg

SEQ ID NO: 37966 - DNA, 20 bp, Artificial Sequence
  Synthetic
agctcctcgcccggcgcgat

SEQ ID NO: 37967 - DNA, 20 bp, Artificial Sequence
  Synthetic
cgcgccgggcgaggagctcc

SEQ ID NO: 37968 - DNA, 20 bp, Artificial Sequence
  Synthetic
cagaccaggagctcctcgcc

SEQ ID NO: 37969 - DNA, 20 bp, Artificial Sequence
  Synthetic
cgggcgaggagctcctggtc

SEQ ID NO: 37970 - DNA, 20 bp, Artificial Sequence
  Synthetic
gagctcctggtctggtacaa

SEQ ID NO: 37971 - DNA, 20 bp, Artificial Sequence
  Synthetic
agctcctggtctggtacaat

SEQ ID NO: 37972 - DNA, 20 bp, Artificial Sequence
  Synthetic
gctcctggtctggtacaatg

SEQ ID NO: 37973 - DNA, 20 bp, Artificial Sequence
  Synthetic
cttccccattgtaccagacc

SEQ ID NO: 37974 - DNA, 20 bp, Artificial Sequence
  Synthetic
cctggcctacggcatctgcg

SEQ ID NO: 37975 - DNA, 20 bp, Artificial Sequence
  Synthetic
ctgcgccgcgcagatgccgt

SEQ ID NO: 37976 - DNA, 20 bp, Artificial Sequence
  Synthetic
acggcatctgcgcggcgcag

SEQ ID NO: 37977 - DNA, 20 bp, Artificial Sequence
  Synthetic
gcggcgcagaggatccagca

SEQ ID NO: 37978 - DNA, 20 bp, Artificial Sequence
  Synthetic
agaggatccagcaaggcacc

SEQ ID NO: 37979 - DNA, 20 bp, Artificial Sequence
  Synthetic
atccagcaaggcacctggat

SEQ ID NO: 37980 - DNA, 20 bp, Artificial Sequence
  Synthetic
gtccaatccaggtgccttgc

SEQ ID NO: 37981 - DNA, 20 bp, Artificial Sequence
  Synthetic
acctggattggacctttcca

SEQ ID NO: 37982 - DNA, 20 bp, Artificial Sequence
  Synthetic
gccttggaaaggtccaatcc

SEQ ID NO: 37983 - DNA, 20 bp, Artificial Sequence
  Synthetic
ggcagaagcacgccttggaa

SEQ ID NO: 37984 - DNA, 20 bp, Artificial Sequence
  Synthetic
ctgggggcagaagcacgcct

SEQ ID NO: 37985 - DNA, 20 bp, Artificial Sequence
  Synthetic
cgtgcttctgcccccagaga

SEQ ID NO: 37986 - DNA, 20 bp, Artificial Sequence
  Synthetic
tctgcccccagagaaggtgc

SEQ ID NO: 37987 - DNA, 20 bp, Artificial Sequence
  Synthetic
cctgcctgcaccttctctgg

SEQ ID NO: 37988 - DNA, 20 bp, Artificial Sequence
  Synthetic
cccccagagaaggtgcaggc

SEQ ID NO: 37989 - DNA, 20 bp, Artificial Sequence
  Synthetic
gcctgcctgcaccttctctg

SEQ ID NO: 37990 - DNA, 20 bp, Artificial Sequence
  Synthetic
cgcctgcctgcaccttctct

SEQ ID NO: 37991 - DNA, 20 bp, Artificial Sequence
  Synthetic
gcgcctgcctgcaccttctc

SEQ ID NO: 37992 - DNA, 20 bp, Artificial Sequence
  Synthetic
aggtgcaggcaggcgccgtg

SEQ ID NO: 37993 - DNA, 20 bp, Artificial Sequence
  Synthetic
gagatgctgcgtgttcctca

SEQ ID NO: 37994 - DNA, 20 bp, Artificial Sequence
  Synthetic
tgaggaacacgcagcatctc

SEQ ID NO: 37995 - DNA, 20 bp, Artificial Sequence
  Synthetic
gaggaacacgcagcatctct

SEQ ID NO: 37996 - DNA, 20 bp, Artificial Sequence
  Synthetic
gaacacgcagcatctctggg

SEQ ID NO: 37997 - DNA, 20 bp, Artificial Sequence
  Synthetic
tcttctccagatatatgacc

SEQ ID NO: 37998 - DNA, 20 bp, Artificial Sequence
  Synthetic
ctccagatatatgaccagga

SEQ ID NO: 37999 - DNA, 20 bp, Artificial Sequence
  Synthetic
tccagatatatgaccaggat

SEQ ID NO: 38000 - DNA, 20 bp, Artificial Sequence
  Synthetic
tcccatcctggtcatatatc

SEQ ID NO: 38001 - DNA, 20 bp, Artificial Sequence
  Synthetic
agtgctgtagtgtcccatcc

SEQ ID NO: 38002 - DNA, 20 bp, Artificial Sequence
  Synthetic
acactacagcactttattga

SEQ ID NO: 38003 - DNA, 20 bp, Artificial Sequence
  Synthetic
ctacagcactttattgatgg

SEQ ID NO: 38004 - DNA, 20 bp, Artificial Sequence
  Synthetic
tacagcactttattgatggt

SEQ ID NO: 38005 - DNA, 20 bp, Artificial Sequence
  Synthetic
acagcactttattgatggtg

SEQ ID NO: 38006 - DNA, 20 bp, Artificial Sequence
  Synthetic
gggaacctagtaagtcgagc

SEQ ID NO: 38007 - DNA, 20 bp, Artificial Sequence
  Synthetic
ctcatccagctcgacttact

SEQ ID NO: 38008 - DNA, 20 bp, Artificial Sequence
  Synthetic
ctagtaagtcgagctggatg

SEQ ID NO: 38009 - DNA, 20 bp, Artificial Sequence
  Synthetic
tgaggtatatccgatgtgca

SEQ ID NO: 38010 - DNA, 20 bp, Artificial Sequence
  Synthetic
atccgatgtgcaaggcactg

SEQ ID NO: 38011 - DNA, 20 bp, Artificial Sequence
  Synthetic
ctccgcagtgccttgcacat

SEQ ID NO: 38012 - DNA, 20 bp, Artificial Sequence
  Synthetic
atctaacagtagttcagtac

SEQ ID NO: 38013 - DNA, 20 bp, Artificial Sequence
  Synthetic
tagggatatctatacaggct

SEQ ID NO: 38014 - DNA, 20 bp, Artificial Sequence
  Synthetic
gagcctgtatagatatccct

SEQ ID NO: 38015 - DNA, 20 bp, Artificial Sequence
  Synthetic
agcctgtatagatatcccta

SEQ ID NO: 38016 - DNA, 20 bp, Artificial Sequence
  Synthetic
gcctgtatagatatccctag

SEQ ID NO: 38017 - DNA, 20 bp, Artificial Sequence
  Synthetic
gcccctagggatatctatac

SEQ ID NO: 38018 - DNA, 20 bp, Artificial Sequence
  Synthetic
ccagaagctcggtgccccta

SEQ ID NO: 38019 - DNA, 20 bp, Artificial Sequence
  Synthetic
ccctaggggcaccgagcttc

SEQ ID NO: 38020 - DNA, 20 bp, Artificial Sequence
  Synthetic
accagaagctcggtgcccct

SEQ ID NO: 38021 - DNA, 20 bp, Artificial Sequence
  Synthetic
ggggcaccgagcttctggtg

SEQ ID NO: 38022 - DNA, 20 bp, Artificial Sequence
  Synthetic
attgtaccacaccagaagct

SEQ ID NO: 38023 - DNA, 20 bp, Artificial Sequence
  Synthetic
tgaactgctggtctggtatg

SEQ ID NO: 38024 - DNA, 20 bp, Artificial Sequence
  Synthetic
caacctagaactcaggaaga

SEQ ID NO: 38025 - DNA, 20 bp, Artificial Sequence
  Synthetic
attgacagctgtgctgccca

SEQ ID NO: 38026 - DNA, 20 bp, Artificial Sequence
  Synthetic
atagaacctgccgagtcatt

SEQ ID NO: 38027 - DNA, 20 bp, Artificial Sequence
  Synthetic
acctgccgagtcattaggcc

SEQ ID NO: 38028 - DNA, 20 bp, Artificial Sequence
  Synthetic
gcctggcctaatgactcggc

SEQ ID NO: 38029 - DNA, 20 bp, Artificial Sequence
  Synthetic
cacagcctggcctaatgact

SEQ ID NO: 38030 - DNA, 20 bp, Artificial Sequence
  Synthetic
taggccaggctgtgaactgc

SEQ ID NO: 38031 - DNA, 20 bp, Artificial Sequence
  Synthetic
cagaccagcagttcacagcc

SEQ ID NO: 38032 - DNA, 20 bp, Artificial Sequence
  Synthetic
caggctgtgaactgctggtc

SEQ ID NO: 38033 - DNA, 20 bp, Artificial Sequence
  Synthetic
tgtgaactgctggtctggta

SEQ ID NO: 38034 - DNA, 20 bp, Artificial Sequence
  Synthetic
gtgaactgctggtctggtat

SEQ ID NO: 38035 - DNA, 20 bp, Artificial Sequence
  Synthetic
acacatgaaagctggtcgag

SEQ ID NO: 38036 - DNA, 20 bp, Artificial Sequence
  Synthetic
cttcggtgacacatgaaagc

SEQ ID NO: 38037 - DNA, 20 bp, Artificial Sequence
  Synthetic
cagctttcatgtgtcaccga

SEQ ID NO: 38038 - DNA, 20 bp, Artificial Sequence
  Synthetic
tttcatgtgtcaccgaaggc

SEQ ID NO: 38039 - DNA, 20 bp, Artificial Sequence
  Synthetic
ggagtttgatggcctgcctt

SEQ ID NO: 38040 - DNA, 20 bp, Artificial Sequence
  Synthetic
aaggcaggccatcaaactcc

SEQ ID NO: 38041 - DNA, 20 bp, Artificial Sequence
  Synthetic
gcaggccatcaaactccagg

SEQ ID NO: 38042 - DNA, 20 bp, Artificial Sequence
  Synthetic
gtcatccacctggagtttga

SEQ ID NO: 38043 - DNA, 20 bp, Artificial Sequence
  Synthetic
aatcttctgtgtcatccacc

SEQ ID NO: 38044 - DNA, 20 bp, Artificial Sequence
  Synthetic
cagaagattctgatgaagaa

SEQ ID NO: 38045 - DNA, 20 bp, Artificial Sequence
  Synthetic
gaatggacccctaggcagca

SEQ ID NO: 38046 - DNA, 20 bp, Artificial Sequence
  Synthetic
tccctcttaccttgctgcct

SEQ ID NO: 38047 - DNA, 20 bp, Artificial Sequence
  Synthetic
tttagtcaaacctccttgga

SEQ ID NO: 38048 - DNA, 20 bp, Artificial Sequence
  Synthetic
tttgggaaatacttaccttc

SEQ ID NO: 38049 - DNA, 20 bp, Artificial Sequence
  Synthetic
cacattaaagggaatgccca

SEQ ID NO: 38050 - DNA, 20 bp, Artificial Sequence
  Synthetic
tcattactgaatgacgcctt

SEQ ID NO: 38051 - DNA, 20 bp, Artificial Sequence
  Synthetic
ttcattactgaatgacgcct

SEQ ID NO: 38052 - DNA, 20 bp, Artificial Sequence
  Synthetic
cagaaaccagtgtccccttc

SEQ ID NO: 38053 - DNA, 20 bp, Artificial Sequence
  Synthetic
gcttctccagaaggggacac

SEQ ID NO: 38054 - DNA, 20 bp, Artificial Sequence
  Synthetic
ggtacttgcttctccagaag

SEQ ID NO: 38055 - DNA, 20 bp, Artificial Sequence
  Synthetic
aggtacttgcttctccagaa

SEQ ID NO: 38056 - DNA, 20 bp, Artificial Sequence
  Synthetic
gaggtacttgcttctccaga

SEQ ID NO: 38057 - DNA, 20 bp, Artificial Sequence
  Synthetic
tctggagaagcaagtacctc

SEQ ID NO: 38058 - DNA, 20 bp, Artificial Sequence
  Synthetic
tagtcttgagtgctgtccag

SEQ ID NO: 38059 - DNA, 20 bp, Artificial Sequence
  Synthetic
acagcactcaagactaaaac

SEQ ID NO: 38060 - DNA, 20 bp, Artificial Sequence
  Synthetic
cagcactcaagactaaaact

SEQ ID NO: 38061 - DNA, 20 bp, Artificial Sequence
  Synthetic
tcttctccaacctagaactc

SEQ ID NO: 38062 - DNA, 20 bp, Artificial Sequence
  Synthetic
gtatagcctgcgagaaagaa

SEQ ID NO: 38063 - DNA, 20 bp, Artificial Sequence
  Synthetic
tatagcctgcgagaaagaaa

SEQ ID NO: 38064 - DNA, 20 bp, Artificial Sequence
  Synthetic
catgaccctttctttctcgc

SEQ ID NO: 38065 - DNA, 20 bp, Artificial Sequence
  Synthetic
cagaggtaatcatcatcctg

SEQ ID NO: 38066 - DNA, 20 bp, Artificial Sequence
  Synthetic
ttctgacacatctcacaatc

SEQ ID NO: 38067 - DNA, 20 bp, Artificial Sequence
  Synthetic
ttgacagctgtgctgcccat

SEQ ID NO: 38068 - DNA, 20 bp, Artificial Sequence
  Synthetic
tgggccccctacatttgtaa

SEQ ID NO: 38069 - DNA, 20 bp, Artificial Sequence
  Synthetic
ctgtcctttacaaatgtagg

SEQ ID NO: 38070 - DNA, 20 bp, Artificial Sequence
  Synthetic
actgtcctttacaaatgtag

SEQ ID NO: 38071 - DNA, 20 bp, Artificial Sequence
  Synthetic
cactgtcctttacaaatgta

SEQ ID NO: 38072 - DNA, 20 bp, Artificial Sequence
  Synthetic
gcactgtcctttacaaatgt

SEQ ID NO: 38073 - DNA, 20 bp, Artificial Sequence
  Synthetic
atttgtaaaggacagtgcag

SEQ ID NO: 38074 - DNA, 20 bp, Artificial Sequence
  Synthetic
aaaggacagtgcagtggaca

SEQ ID NO: 38075 - DNA, 20 bp, Artificial Sequence
  Synthetic
aaggacagtgcagtggacaa

SEQ ID NO: 38076 - DNA, 20 bp, Artificial Sequence
  Synthetic
aggacagtgcagtggacaag

SEQ ID NO: 38077 - DNA, 20 bp, Artificial Sequence
  Synthetic
agactgagggctgaacggtt

SEQ ID NO: 38078 - DNA, 20 bp, Artificial Sequence
  Synthetic
cagactgagggctgaacggt

SEQ ID NO: 38079 - DNA, 20 bp, Artificial Sequence
  Synthetic
ggggcagactgagggctgaa

SEQ ID NO: 38080 - DNA, 20 bp, Artificial Sequence
  Synthetic
tcagccctcagtctgccccc

SEQ ID NO: 38081 - DNA, 20 bp, Artificial Sequence
  Synthetic
cagccctcagtctgccccca

SEQ ID NO: 38082 - DNA, 20 bp, Artificial Sequence
  Synthetic
cagccctgggggcagactga

SEQ ID NO: 38083 - DNA, 20 bp, Artificial Sequence
  Synthetic
tcagccctgggggcagactg

SEQ ID NO: 38084 - DNA, 20 bp, Artificial Sequence
  Synthetic
ctgcccccagggctgagaat

SEQ ID NO: 38085 - DNA, 20 bp, Artificial Sequence
  Synthetic
tgcccccagggctgagaatt

SEQ ID NO: 38086 - DNA, 20 bp, Artificial Sequence
  Synthetic
ggcccaattctcagccctgg

SEQ ID NO: 38087 - DNA, 20 bp, Artificial Sequence
  Synthetic
tggcccaattctcagccctg

SEQ ID NO: 38088 - DNA, 20 bp, Artificial Sequence
  Synthetic
atggcccaattctcagccct

SEQ ID NO: 38089 - DNA, 20 bp, Artificial Sequence
  Synthetic
gatggcccaattctcagccc

SEQ ID NO: 38090 - DNA, 20 bp, Artificial Sequence
  Synthetic
gggctgagaattgggccatc

SEQ ID NO: 38091 - DNA, 20 bp, Artificial Sequence
  Synthetic
tgggccatcaggcatccctc

SEQ ID NO: 38092 - DNA, 20 bp, Artificial Sequence
  Synthetic
ccagcctgagggatgcctga

SEQ ID NO: 38093 - DNA, 20 bp, Artificial Sequence
  Synthetic
ccatcaggcatccctcaggc

SEQ ID NO: 38094 - DNA, 20 bp, Artificial Sequence
  Synthetic
catcaggcatccctcaggct

SEQ ID NO: 38095 - DNA, 20 bp, Artificial Sequence
  Synthetic
ggcatccctcaggctgggct

SEQ ID NO: 38096 - DNA, 20 bp, Artificial Sequence
  Synthetic
atactccaagcccagcctga

SEQ ID NO: 38097 - DNA, 20 bp, Artificial Sequence
  Synthetic
catactccaagcccagcctg

SEQ ID NO: 38098 - DNA, 20 bp, Artificial Sequence
  Synthetic
ctcaggctgggcttggagta

SEQ ID NO: 38099 - DNA, 20 bp, Artificial Sequence
  Synthetic
tgggcttggagtatggaatg

SEQ ID NO: 38100 - DNA, 20 bp, Artificial Sequence
  Synthetic
gaggcatctgatctgccgct

SEQ ID NO: 38101 - DNA, 20 bp, Artificial Sequence
  Synthetic
ctgccgctgggtctgcactt

SEQ ID NO: 38102 - DNA, 20 bp, Artificial Sequence
  Synthetic
gggccaaagtgcagacccag

SEQ ID NO: 38103 - DNA, 20 bp, Artificial Sequence
  Synthetic
tctgcactttggcccttatg

SEQ ID NO: 38104 - DNA, 20 bp, Artificial Sequence
  Synthetic
ctgcactttggcccttatga

SEQ ID NO: 38105 - DNA, 20 bp, Artificial Sequence
  Synthetic
ctgtaattcggccctcataa

SEQ ID NO: 38106 - DNA, 20 bp, Artificial Sequence
  Synthetic
tctgtaattcggccctcata

SEQ ID NO: 38107 - DNA, 20 bp, Artificial Sequence
  Synthetic
cctcttcgtcttctgtaatt

SEQ ID NO: 38108 - DNA, 20 bp, Artificial Sequence
  Synthetic
ccgaattacagaagacgaag

SEQ ID NO: 38109 - DNA, 20 bp, Artificial Sequence
  Synthetic
gacgaagaggcagccaacaa

SEQ ID NO: 38110 - DNA, 20 bp, Artificial Sequence
  Synthetic
gcaggctcttcttaccagcc

SEQ ID NO: 38111 - DNA, 20 bp, Artificial Sequence
  Synthetic
ttctgaaactcagatcacca

SEQ ID NO: 38112 - DNA, 20 bp, Artificial Sequence
  Synthetic
tctgaaactcagatcaccaa

SEQ ID NO: 38113 - DNA, 20 bp, Artificial Sequence
  Synthetic
ctgaaactcagatcaccaag

SEQ ID NO: 38114 - DNA, 20 bp, Artificial Sequence
  Synthetic
ctcatagcagtttctcccct

SEQ ID NO: 38115 - DNA, 20 bp, Artificial Sequence
  Synthetic
gagaaactgctatgagtatg

SEQ ID NO: 38116 - DNA, 20 bp, Artificial Sequence
  Synthetic
aactgctatgagtatgtgga

SEQ ID NO: 38117 - DNA, 20 bp, Artificial Sequence
  Synthetic
ggatggaaaagataaatcct

SEQ ID NO: 38118 - DNA, 20 bp, Artificial Sequence
  Synthetic
aagataaatcctgggccaac

SEQ ID NO: 38119 - DNA, 20 bp, Artificial Sequence
  Synthetic
aatcctgggccaactggatg

SEQ ID NO: 38120 - DNA, 20 bp, Artificial Sequence
  Synthetic
ttacctcatccagttggccc

SEQ ID NO: 38121 - DNA, 20 bp, Artificial Sequence
  Synthetic
ctggccttacctcatccagt

SEQ ID NO: 38122 - DNA, 20 bp, Artificial Sequence
  Synthetic
ccgggcacagttcacatacc

SEQ ID NO: 38123 - DNA, 20 bp, Artificial Sequence
  Synthetic
ccaggtatgtgaactgtgcc

SEQ ID NO: 38124 - DNA, 20 bp, Artificial Sequence
  Synthetic
caggtatgtgaactgtgccc

SEQ ID NO: 38125 - DNA, 20 bp, Artificial Sequence
  Synthetic
gttctgctcttcatcatccc

SEQ ID NO: 38126 - DNA, 20 bp, Artificial Sequence
  Synthetic
ggttctgctcttcatcatcc

SEQ ID NO: 38127 - DNA, 20 bp, Artificial Sequence
  Synthetic
ggatgatgaagagcagaacc

SEQ ID NO: 38128 - DNA, 20 bp, Artificial Sequence
  Synthetic
tgatgaagagcagaacctgg

SEQ ID NO: 38129 - DNA, 20 bp, Artificial Sequence
  Synthetic
tgtggtactggaaggccacc

SEQ ID NO: 38130 - DNA, 20 bp, Artificial Sequence
  Synthetic
tggtggccttccagtaccac

SEQ ID NO: 38131 - DNA, 20 bp, Artificial Sequence
  Synthetic
gatctgcctgtggtactgga

SEQ ID NO: 38132 - DNA, 20 bp, Artificial Sequence
  Synthetic
agaagatctgcctgtggtac

SEQ ID NO: 38133 - DNA, 20 bp, Artificial Sequence
  Synthetic
ttctatagaagatctgcctg

SEQ ID NO: 38134 - DNA, 20 bp, Artificial Sequence
  Synthetic
ctgatgaagaatggacccct

SEQ ID NO: 38135 - DNA, 20 bp, Artificial Sequence
  Synthetic
cctcttaccttgctgcctag

SEQ ID NO: 38136 - DNA, 20 bp, Artificial Sequence
  Synthetic
ccctcttaccttgctgccta

SEQ ID NO: 38137 - DNA, 20 bp, Artificial Sequence
  Synthetic
actcttaaggccatccaagg

SEQ ID NO: 38138 - DNA, 20 bp, Artificial Sequence
  Synthetic
tccttggatggccttaagag

SEQ ID NO: 38139 - DNA, 20 bp, Artificial Sequence
  Synthetic
tccactcttaaggccatcca

SEQ ID NO: 38140 - DNA, 20 bp, Artificial Sequence
  Synthetic
tttacgctgttccactctta

SEQ ID NO: 38141 - DNA, 20 bp, Artificial Sequence
  Synthetic
ggaacagcgtaaacaccaga

SEQ ID NO: 38142 - DNA, 20 bp, Artificial Sequence
  Synthetic
gcaaatttactgaatgcaag

SEQ ID NO: 38143 - DNA, 20 bp, Artificial Sequence
  Synthetic
gaatgcaagtggctcagagc

SEQ ID NO: 38144 - DNA, 20 bp, Artificial Sequence
  Synthetic
aaagggtcatgcatacaaag

SEQ ID NO: 38145 - DNA, 20 bp, Artificial Sequence
  Synthetic
caaagaggtcagcgagccgc

SEQ ID NO: 38146 - DNA, 20 bp, Artificial Sequence
  Synthetic
tacaaatgtagggggcccat

SEQ ID NO: 38147 - DNA, 20 bp, Artificial Sequence
  Synthetic
ttacaaatgtagggggccca

SEQ ID NO: 38148 - DNA, 20 bp, Artificial Sequence
  Synthetic
gactgagggctgaacggttg

SEQ ID NO: 38149 - DNA, 20 bp, Artificial Sequence
  Synthetic
tgaggcatctgatctgccgc

SEQ ID NO: 38150 - DNA, 20 bp, Artificial Sequence
  Synthetic
cagccaacaatggatactcc

SEQ ID NO: 38151 - DNA, 20 bp, Artificial Sequence
  Synthetic
cagccaggagtatccattgt

SEQ ID NO: 38152 - DNA, 20 bp, Artificial Sequence
  Synthetic
caacaatggatactcctggc

SEQ ID NO: 38153 - DNA, 20 bp, Artificial Sequence
  Synthetic
tggatggaaaagataaatcc

SEQ ID NO: 38154 - DNA, 20 bp, Artificial Sequence
  Synthetic
accttttagtcaaacctcct

SEQ ID NO: 38155 - DNA, 20 bp, Artificial Sequence
  Synthetic
ccggcacctcttcaaggaca

SEQ ID NO: 38156 - DNA, 20 bp, Artificial Sequence
  Synthetic
gcacctcttcaaggacaagg

SEQ ID NO: 38157 - DNA, 20 bp, Artificial Sequence
  Synthetic
cttcaaggacaaggtggtgc

SEQ ID NO: 38158 - DNA, 20 bp, Artificial Sequence
  Synthetic
gacaaggtggtgctggacgt

SEQ ID NO: 38159 - DNA, 20 bp, Artificial Sequence
  Synthetic
ggtggtgctggacgtcggct

SEQ ID NO: 38160 - DNA, 20 bp, Artificial Sequence
  Synthetic
gtggtgctggacgtcggctc

SEQ ID NO: 38161 - DNA, 20 bp, Artificial Sequence
  Synthetic
ctggacgtcggctcgggcac

SEQ ID NO: 38162 - DNA, 20 bp, Artificial Sequence
  Synthetic
agcaaacatgcagaggatgc

SEQ ID NO: 38163 - DNA, 20 bp, Artificial Sequence
  Synthetic
ccttggcagcaaacatgcag

SEQ ID NO: 38164 - DNA, 20 bp, Artificial Sequence
  Synthetic
cctctgcatgtttgctgcca

SEQ ID NO: 38165 - DNA, 20 bp, Artificial Sequence
  Synthetic
tgcatgtttgctgccaaggc

SEQ ID NO: 38166 - DNA, 20 bp, Artificial Sequence
  Synthetic
gcatgtttgctgccaaggcc

SEQ ID NO: 38167 - DNA, 20 bp, Artificial Sequence
  Synthetic
catgtttgctgccaaggccg

SEQ ID NO: 38168 - DNA, 20 bp, Artificial Sequence
  Synthetic
tgccaaggccggggcccgca

SEQ ID NO: 38169 - DNA, 20 bp, Artificial Sequence
  Synthetic
gaccttgcgggccccggcct

SEQ ID NO: 38170 - DNA, 20 bp, Artificial Sequence
  Synthetic
gccggggcccgcaaggtcat

SEQ ID NO: 38171 - DNA, 20 bp, Artificial Sequence
  Synthetic
cccgatgaccttgcgggccc

SEQ ID NO: 38172 - DNA, 20 bp, Artificial Sequence
  Synthetic
ccggggcccgcaaggtcatc

SEQ ID NO: 38173 - DNA, 20 bp, Artificial Sequence
  Synthetic
cggggcccgcaaggtcatcg

SEQ ID NO: 38174 - DNA, 20 bp, Artificial Sequence
  Synthetic
actcaccccgatgaccttgc

SEQ ID NO: 38175 - DNA, 20 bp, Artificial Sequence
  Synthetic
gactcaccccgatgaccttg

SEQ ID NO: 38176 - DNA, 20 bp, Artificial Sequence
  Synthetic
ttccagtatctctgattatg

SEQ ID NO: 38177 - DNA, 20 bp, Artificial Sequence
  Synthetic
caccgcataatcagagatac

SEQ ID NO: 38178 - DNA, 20 bp, Artificial Sequence
  Synthetic
aaagccaacaagttagacca

SEQ ID NO: 38179 - DNA, 20 bp, Artificial Sequence
  Synthetic
ctcaccgtggtctaacttgt

SEQ ID NO: 38180 - DNA, 20 bp, Artificial Sequence
  Synthetic
cgcagtggtgaccatcatca

SEQ ID NO: 38181 - DNA, 20 bp, Artificial Sequence
  Synthetic
gcagtggtgaccatcatcaa

SEQ ID NO: 38182 - DNA, 20 bp, Artificial Sequence
  Synthetic
cagtggtgaccatcatcaag

SEQ ID NO: 38183 - DNA, 20 bp, Artificial Sequence
  Synthetic
ggtgaccatcatcaagggga

SEQ ID NO: 38184 - DNA, 20 bp, Artificial Sequence
  Synthetic
gaccatcatcaaggggaagg

SEQ ID NO: 38185 - DNA, 20 bp, Artificial Sequence
  Synthetic
ctccaccttccccttgatga

SEQ ID NO: 38186 - DNA, 20 bp, Artificial Sequence
  Synthetic
catcatcaaggggaaggtgg

SEQ ID NO: 38187 - DNA, 20 bp, Artificial Sequence
  Synthetic
catcaaggggaaggtggagg

SEQ ID NO: 38188 - DNA, 20 bp, Artificial Sequence
  Synthetic
caaggggaaggtggaggagg

SEQ ID NO: 38189 - DNA, 20 bp, Artificial Sequence
  Synthetic
ggaggaggtggagctcccag

SEQ ID NO: 38190 - DNA, 20 bp, Artificial Sequence
  Synthetic
ggtggagctcccagtggaga

SEQ ID NO: 38191 - DNA, 20 bp, Artificial Sequence
  Synthetic
ggagctcccagtggagaagg

SEQ ID NO: 38192 - DNA, 20 bp, Artificial Sequence
  Synthetic
tgatgtccaccttctccact

SEQ ID NO: 38193 - DNA, 20 bp, Artificial Sequence
  Synthetic
atgatgtccaccttctccac

SEQ ID NO: 38194 - DNA, 20 bp, Artificial Sequence
  Synthetic
tggacatcatcatcagcgag

SEQ ID NO: 38195 - DNA, 20 bp, Artificial Sequence
  Synthetic
gcagaataaagaatccctga

SEQ ID NO: 38196 - DNA, 20 bp, Artificial Sequence
  Synthetic
caggatgactttatccgtca

SEQ ID NO: 38197 - DNA, 20 bp, Artificial Sequence
  Synthetic
ccaggatgactttatccgtc

SEQ ID NO: 38198 - DNA, 20 bp, Artificial Sequence
  Synthetic
cctgacggataaagtcatcc

SEQ ID NO: 38199 - DNA, 20 bp, Artificial Sequence
  Synthetic
ggataaagtcatcctggacg

SEQ ID NO: 38200 - DNA, 20 bp, Artificial Sequence
  Synthetic
gataaagtcatcctggacgt

SEQ ID NO: 38201 - DNA, 20 bp, Artificial Sequence
  Synthetic
gtcatcctggacgtgggctg

SEQ ID NO: 38202 - DNA, 20 bp, Artificial Sequence
  Synthetic
tcatcctggacgtgggctgt

SEQ ID NO: 38203 - DNA, 20 bp, Artificial Sequence
  Synthetic
cagtcccacagcccacgtcc

SEQ ID NO: 38204 - DNA, 20 bp, Artificial Sequence
  Synthetic
ctggacgtgggctgtgggac

SEQ ID NO: 38205 - DNA, 20 bp, Artificial Sequence
  Synthetic
tggacgtgggctgtgggact

SEQ ID NO: 38206 - DNA, 20 bp, Artificial Sequence
  Synthetic
tcttctgtgcacactatgcg

SEQ ID NO: 38207 - DNA, 20 bp, Artificial Sequence
  Synthetic
acactatgcgcggcctagag

SEQ ID NO: 38208 - DNA, 20 bp, Artificial Sequence
  Synthetic
gagaccccactcaccgctct

SEQ ID NO: 38209 - DNA, 20 bp, Artificial Sequence
  Synthetic
tctgctgctgcaggtgtacg

SEQ ID NO: 38210 - DNA, 20 bp, Artificial Sequence
  Synthetic
gctgctgcaggtgtacgcgg

SEQ ID NO: 38211 - DNA, 20 bp, Artificial Sequence
  Synthetic
gctgcaggtgtacgcggtgg

SEQ ID NO: 38212 - DNA, 20 bp, Artificial Sequence
  Synthetic
cgcggtggaggccagtgaga

SEQ ID NO: 38213 - DNA, 20 bp, Artificial Sequence
  Synthetic
cgtgtgctgtgccatctcac

SEQ ID NO: 38214 - DNA, 20 bp, Artificial Sequence
  Synthetic
cagtgagatggcacagcaca

SEQ ID NO: 38215 - DNA, 20 bp, Artificial Sequence
  Synthetic
agtgagatggcacagcacac

SEQ ID NO: 38216 - DNA, 20 bp, Artificial Sequence
  Synthetic
gtgagatggcacagcacacg

SEQ ID NO: 38217 - DNA, 20 bp, Artificial Sequence
  Synthetic
ggcacagcacacggggcagc

SEQ ID NO: 38218 - DNA, 20 bp, Artificial Sequence
  Synthetic
gggcagctggtcctgcagaa

SEQ ID NO: 38219 - DNA, 20 bp, Artificial Sequence
  Synthetic
tgtcagcaaagccgttctgc

SEQ ID NO: 38220 - DNA, 20 bp, Artificial Sequence
  Synthetic
catcaccgtgtaccagcaga

SEQ ID NO: 38221 - DNA, 20 bp, Artificial Sequence
  Synthetic
caccgtgtaccagcagaagg

SEQ ID NO: 38222 - DNA, 20 bp, Artificial Sequence
  Synthetic
ctccaccttctgctggtaca

SEQ ID NO: 38223 - DNA, 20 bp, Artificial Sequence
  Synthetic
cgtgtaccagcagaaggtgg

SEQ ID NO: 38224 - DNA, 20 bp, Artificial Sequence
  Synthetic
ccacatcctccaccttctgc

SEQ ID NO: 38225 - DNA, 20 bp, Artificial Sequence
  Synthetic
ccagcagaaggtggaggatg

SEQ ID NO: 38226 - DNA, 20 bp, Artificial Sequence
  Synthetic
ggatgtggtgctgcccgaga

SEQ ID NO: 38227 - DNA, 20 bp, Artificial Sequence
  Synthetic
tgtggtgctgcccgagaagg

SEQ ID NO: 38228 - DNA, 20 bp, Artificial Sequence
  Synthetic
gcccgagaaggtggacgtgc

SEQ ID NO: 38229 - DNA, 20 bp, Artificial Sequence
  Synthetic
accagcacgtccaccttctc

SEQ ID NO: 38230 - DNA, 20 bp, Artificial Sequence
  Synthetic
caccagcacgtccaccttct

SEQ ID NO: 38231 - DNA, 20 bp, Artificial Sequence
  Synthetic
tggacgtgctggtgtctgag

SEQ ID NO: 38232 - DNA, 20 bp, Artificial Sequence
  Synthetic
cgtgctggtgtctgagtgga

SEQ ID NO: 38233 - DNA, 20 bp, Artificial Sequence
  Synthetic
gtgctggtgtctgagtggat

SEQ ID NO: 38234 - DNA, 20 bp, Artificial Sequence
  Synthetic
tgctggtgtctgagtggatg

SEQ ID NO: 38235 - DNA, 20 bp, Artificial Sequence
  Synthetic
gtggatggggacctgcctgc

SEQ ID NO: 38236 - DNA, 20 bp, Artificial Sequence
  Synthetic
gcccgccctcaccagcaggc

SEQ ID NO: 38237 - DNA, 20 bp, Artificial Sequence
  Synthetic
gcacgcccgccctcaccagc

SEQ ID NO: 38238 - DNA, 20 bp, Artificial Sequence
  Synthetic
tcgagtccatcctgtatgcc

SEQ ID NO: 38239 - DNA, 20 bp, Artificial Sequence
  Synthetic
cgagtccatcctgtatgccc

SEQ ID NO: 38240 - DNA, 20 bp, Artificial Sequence
  Synthetic
ggcatcccgggcatacagga

SEQ ID NO: 38241 - DNA, 20 bp, Artificial Sequence
  Synthetic
tcctgtatgcccgggatgcc

SEQ ID NO: 38242 - DNA, 20 bp, Artificial Sequence
  Synthetic
gccaggcatcccgggcatac

SEQ ID NO: 38243 - DNA, 20 bp, Artificial Sequence
  Synthetic
tgcccgggatgcctggctga

SEQ ID NO: 38244 - DNA, 20 bp, Artificial Sequence
  Synthetic
ctccttcagccaggcatccc

SEQ ID NO: 38245 - DNA, 20 bp, Artificial Sequence
  Synthetic
cctccttcagccaggcatcc

SEQ ID NO: 38246 - DNA, 20 bp, Artificial Sequence
  Synthetic
ccgggatgcctggctgaagg

SEQ ID NO: 38247 - DNA, 20 bp, Artificial Sequence
  Synthetic
gatgcctggctgaaggagga

SEQ ID NO: 38248 - DNA, 20 bp, Artificial Sequence
  Synthetic
atgcctggctgaaggaggac

SEQ ID NO: 38249 - DNA, 20 bp, Artificial Sequence
  Synthetic
tgcctggctgaaggaggacg

SEQ ID NO: 38250 - DNA, 20 bp, Artificial Sequence
  Synthetic
gaccccgtcctccttcagcc

SEQ ID NO: 38251 - DNA, 20 bp, Artificial Sequence
  Synthetic
tgaaggaggacggggtcatt

SEQ ID NO: 38252 - DNA, 20 bp, Artificial Sequence
  Synthetic
cggggtcatttggcccacca

SEQ ID NO: 38253 - DNA, 20 bp, Artificial Sequence
  Synthetic
aggtgcaacgcagccatggt

SEQ ID NO: 38254 - DNA, 20 bp, Artificial Sequence
  Synthetic
aaggtgcaacgcagccatgg

SEQ ID NO: 38255 - DNA, 20 bp, Artificial Sequence
  Synthetic
cacaaggtgcaacgcagcca

SEQ ID NO: 38256 - DNA, 20 bp, Artificial Sequence
  Synthetic
tatcagcactgcagggcaca

SEQ ID NO: 38257 - DNA, 20 bp, Artificial Sequence
  Synthetic
tgtgccctgcagtgctgata

SEQ ID NO: 38258 - DNA, 20 bp, Artificial Sequence
  Synthetic
taatccttatcagcactgca

SEQ ID NO: 38259 - DNA, 20 bp, Artificial Sequence
  Synthetic
ataatccttatcagcactgc

SEQ ID NO: 38260 - DNA, 20 bp, Artificial Sequence
  Synthetic
tgataaggattatcgtagca

SEQ ID NO: 38261 - DNA, 20 bp, Artificial Sequence
  Synthetic
atcgtagcaaggtgctcttc

SEQ ID NO: 38262 - DNA, 20 bp, Artificial Sequence
  Synthetic
tcgtagcaaggtgctcttct

SEQ ID NO: 38263 - DNA, 20 bp, Artificial Sequence
  Synthetic
acacttacttcagagcgctg

SEQ ID NO: 38264 - DNA, 20 bp, Artificial Sequence
  Synthetic
ccctagatctttagcagtta

SEQ ID NO: 38265 - DNA, 20 bp, Artificial Sequence
  Synthetic
ttcaaaatgtggttatactt

SEQ ID NO: 38266 - DNA, 20 bp, Artificial Sequence
  Synthetic
tttcaaaatgtggttatact

SEQ ID NO: 38267 - DNA, 20 bp, Artificial Sequence
  Synthetic
agtcttctggtttcaaaatg

SEQ ID NO: 38268 - DNA, 20 bp, Artificial Sequence
  Synthetic
ggttcagagagacagtcttc

SEQ ID NO: 38269 - DNA, 20 bp, Artificial Sequence
  Synthetic
accgtgcactatattgcagt

SEQ ID NO: 38270 - DNA, 20 bp, Artificial Sequence
  Synthetic
tccaactgcaatatagtgca

SEQ ID NO: 38271 - DNA, 20 bp, Artificial Sequence
  Synthetic
ctctagatcagaaatttgca

SEQ ID NO: 38272 - DNA, 20 bp, Artificial Sequence
  Synthetic
cgtgcaaatttctgatctag

SEQ ID NO: 38273 - DNA, 20 bp, Artificial Sequence
  Synthetic
tctgcttgacccagaccctg

SEQ ID NO: 38274 - DNA, 20 bp, Artificial Sequence
  Synthetic
ctgcttgacccagaccctga

SEQ ID NO: 38275 - DNA, 20 bp, Artificial Sequence
  Synthetic
tgcttgacccagaccctgag

SEQ ID NO: 38276 - DNA, 20 bp, Artificial Sequence
  Synthetic
gcagctcgcccctcagggtc

SEQ ID NO: 38277 - DNA, 20 bp, Artificial Sequence
  Synthetic
gaagcgcagctcgcccctca

SEQ ID NO: 38278 - DNA, 20 bp, Artificial Sequence
  Synthetic
cgaagcgcagctcgcccctc

SEQ ID NO: 38279 - DNA, 20 bp, Artificial Sequence
  Synthetic
gcgagctgcgcttcgacatc

SEQ ID NO: 38280 - DNA, 20 bp, Artificial Sequence
  Synthetic
gctgcgcttcgacatcagga

SEQ ID NO: 38281 - DNA, 20 bp, Artificial Sequence
  Synthetic
gcgcttcgacatcaggaagg

SEQ ID NO: 38282 - DNA, 20 bp, Artificial Sequence
  Synthetic
cgcttcgacatcaggaaggc

SEQ ID NO: 38283 - DNA, 20 bp, Artificial Sequence
  Synthetic
gcttcgacatcaggaaggcg

SEQ ID NO: 38284 - DNA, 20 bp, Artificial Sequence
  Synthetic
aggaaggcggggaccctgca

SEQ ID NO: 38285 - DNA, 20 bp, Artificial Sequence
  Synthetic
ggggaccctgcacggcttca

SEQ ID NO: 38286 - DNA, 20 bp, Artificial Sequence
  Synthetic
ccaggccgtgaagccgtgca

SEQ ID NO: 38287 - DNA, 20 bp, Artificial Sequence
  Synthetic
ccctgcacggcttcacggcc

SEQ ID NO: 38288 - DNA, 20 bp, Artificial Sequence
  Synthetic
accaggccgtgaagccgtgc

SEQ ID NO: 38289 - DNA, 20 bp, Artificial Sequence
  Synthetic
ctggaagtggacgctaaacc

SEQ ID NO: 38290 - DNA, 20 bp, Artificial Sequence
  Synthetic
cgtccacttccagagcctgc

SEQ ID NO: 38291 - DNA, 20 bp, Artificial Sequence
  Synthetic
cctcctgcaggctctggaag

SEQ ID NO: 38292 - DNA, 20 bp, Artificial Sequence
  Synthetic
ccacttccagagcctgcagg

SEQ ID NO: 38293 - DNA, 20 bp, Artificial Sequence
  Synthetic
cacttccagagcctgcagga

SEQ ID NO: 38294 - DNA, 20 bp, Artificial Sequence
  Synthetic
acttccagagcctgcaggag

SEQ ID NO: 38295 - DNA, 20 bp, Artificial Sequence
  Synthetic
gctgcccctcctgcaggctc

SEQ ID NO: 38296 - DNA, 20 bp, Artificial Sequence
  Synthetic
gcggcggctgcccctcctgc

SEQ ID NO: 38297 - DNA, 20 bp, Artificial Sequence
  Synthetic
gcaggaggggcagccgccgc

SEQ ID NO: 38298 - DNA, 20 bp, Artificial Sequence
  Synthetic
ccggtgctgagcacctgcgg

SEQ ID NO: 38299 - DNA, 20 bp, Artificial Sequence
  Synthetic
ccgccgcaggtgctcagcac

SEQ ID NO: 38300 - DNA, 20 bp, Artificial Sequence
  Synthetic
cgccgcaggtgctcagcacc

SEQ ID NO: 38301 - DNA, 20 bp, Artificial Sequence
  Synthetic
ggcccggtgctgagcacctg

SEQ ID NO: 38302 - DNA, 20 bp, Artificial Sequence
  Synthetic
cactcacgggtggaagggcc

SEQ ID NO: 38303 - DNA, 20 bp, Artificial Sequence
  Synthetic
ccgcacactcacgggtggaa

SEQ ID NO: 38304 - DNA, 20 bp, Artificial Sequence
  Synthetic
cccgcacactcacgggtgga

SEQ ID NO: 38305 - DNA, 20 bp, Artificial Sequence
  Synthetic
gcgccccgcacactcacggg

SEQ ID NO: 38306 - DNA, 20 bp, Artificial Sequence
  Synthetic
tgtcttgcagcaccacacac

SEQ ID NO: 38307 - DNA, 20 bp, Artificial Sequence
  Synthetic
cagcgtctgcttccagtgtg

SEQ ID NO: 38308 - DNA, 20 bp, Artificial Sequence
  Synthetic
gaagcagacgctgttcatga

SEQ ID NO: 38309 - DNA, 20 bp, Artificial Sequence
  Synthetic
gacccagtccctgtccatac

SEQ ID NO: 38310 - DNA, 20 bp, Artificial Sequence
  Synthetic
ctcctgtatggacagggact

SEQ ID NO: 38311 - DNA, 20 bp, Artificial Sequence
  Synthetic
tctcctgtatggacagggac

SEQ ID NO: 38312 - DNA, 20 bp, Artificial Sequence
  Synthetic
ccacgtctcctgtatggaca

SEQ ID NO: 38313 - DNA, 20 bp, Artificial Sequence
  Synthetic
ccctgtccatacaggagacg

SEQ ID NO: 38314 - DNA, 20 bp, Artificial Sequence
  Synthetic
accacgtctcctgtatggac

SEQ ID NO: 38315 - DNA, 20 bp, Artificial Sequence
  Synthetic
ccgtgaccacgtctcctgta

SEQ ID NO: 38316 - DNA, 20 bp, Artificial Sequence
  Synthetic
ccatacaggagacgtggtca

SEQ ID NO: 38317 - DNA, 20 bp, Artificial Sequence
  Synthetic
catacaggagacgtggtcac

SEQ ID NO: 38318 - DNA, 20 bp, Artificial Sequence
  Synthetic
acagtggggaggagaaaacg

SEQ ID NO: 38319 - DNA, 20 bp, Artificial Sequence
  Synthetic
gggaggagaaaacgtggatg

SEQ ID NO: 38320 - DNA, 20 bp, Artificial Sequence
  Synthetic
tgaacaggtggcacaacttc

SEQ ID NO: 38321 - DNA, 20 bp, Artificial Sequence
  Synthetic
tactatagtcacacaaagtc

SEQ ID NO: 38322 - DNA, 20 bp, Artificial Sequence
  Synthetic
ctttgtgtgactatagtaag

SEQ ID NO: 38323 - DNA, 20 bp, Artificial Sequence
  Synthetic
ctatagtaagaggattgcag

SEQ ID NO: 38324 - DNA, 20 bp, Artificial Sequence
  Synthetic
tatagtaagaggattgcagt

SEQ ID NO: 38325 - DNA, 20 bp, Artificial Sequence
  Synthetic
cctcatgtagctcttgaaat

SEQ ID NO: 38326 - DNA, 20 bp, Artificial Sequence
  Synthetic
ctcatgtagctcttgaaatt

SEQ ID NO: 38327 - DNA, 20 bp, Artificial Sequence
  Synthetic
tcatgtagctcttgaaattg

SEQ ID NO: 38328 - DNA, 20 bp, Artificial Sequence
  Synthetic
caatgacatgattagatggg

SEQ ID NO: 38329 - DNA, 20 bp, Artificial Sequence
  Synthetic
gatcaatgacatgattagat

SEQ ID NO: 38330 - DNA, 20 bp, Artificial Sequence
  Synthetic
cgatcaatgacatgattaga

SEQ ID NO: 38331 - DNA, 20 bp, Artificial Sequence
  Synthetic
ctaatcatgtcattgatcgc

SEQ ID NO: 38332 - DNA, 20 bp, Artificial Sequence
  Synthetic
catgtcattgatcgctggct

SEQ ID NO: 38333 - DNA, 20 bp, Artificial Sequence
  Synthetic
atgtcattgatcgctggctt

SEQ ID NO: 38334 - DNA, 20 bp, Artificial Sequence
  Synthetic
tgtcattgatcgctggcttg

SEQ ID NO: 38335 - DNA, 20 bp, Artificial Sequence
  Synthetic
gggagaatggctgctttgat

SEQ ID NO: 38336 - DNA, 20 bp, Artificial Sequence
  Synthetic
ggggagaatggctgctttga

SEQ ID NO: 38337 - DNA, 20 bp, Artificial Sequence
  Synthetic
gaaaatgctagtggggagaa

SEQ ID NO: 38338 - DNA, 20 bp, Artificial Sequence
  Synthetic
tggtcaggaaaatgctagtg

SEQ ID NO: 38339 - DNA, 20 bp, Artificial Sequence
  Synthetic
ttggtcaggaaaatgctagt

SEQ ID NO: 38340 - DNA, 20 bp, Artificial Sequence
  Synthetic
attggtcaggaaaatgctag

SEQ ID NO: 38341 - DNA, 20 bp, Artificial Sequence
  Synthetic
cattttcctgaccaataaga

SEQ ID NO: 38342 - DNA, 20 bp, Artificial Sequence
  Synthetic
attttcctgaccaataagaa

SEQ ID NO: 38343 - DNA, 20 bp, Artificial Sequence
  Synthetic
gaaatcccttcttattggtc

SEQ ID NO: 38344 - DNA, 20 bp, Artificial Sequence
  Synthetic
aacaggaaatcccttcttat

SEQ ID NO: 38345 - DNA, 20 bp, Artificial Sequence
  Synthetic
tggtgcatcttagaaagaac

SEQ ID NO: 38346 - DNA, 20 bp, Artificial Sequence
  Synthetic
ttctttctaagatgcaccag

SEQ ID NO: 38347 - DNA, 20 bp, Artificial Sequence
  Synthetic
tgcaccagaggctcatcttc

SEQ ID NO: 38348 - DNA, 20 bp, Artificial Sequence
  Synthetic
ggagccggaagatgagcctc

SEQ ID NO: 38349 - DNA, 20 bp, Artificial Sequence
  Synthetic
gctcatcttccggctcctca

SEQ ID NO: 38350 - DNA, 20 bp, Artificial Sequence
  Synthetic
taccactcaccttgaggagc

SEQ ID NO: 38351 - DNA, 20 bp, Artificial Sequence
  Synthetic
ccctcctaccactcaccttg

SEQ ID NO: 38352 - DNA, 20 bp, Artificial Sequence
  Synthetic
ctgacttttctcacagttgg

SEQ ID NO: 38353 - DNA, 20 bp, Artificial Sequence
  Synthetic
gaggtgcagttcatcatcac

SEQ ID NO: 38354 - DNA, 20 bp, Artificial Sequence
  Synthetic
caccaaccaccactcagaga

SEQ ID NO: 38355 - DNA, 20 bp, Artificial Sequence
  Synthetic
ctccttctctgagtggtggt

SEQ ID NO: 38356 - DNA, 20 bp, Artificial Sequence
  Synthetic
agaactccttctctgagtgg

SEQ ID NO: 38357 - DNA, 20 bp, Artificial Sequence
  Synthetic
agcagaactccttctctgag

SEQ ID NO: 38358 - DNA, 20 bp, Artificial Sequence
  Synthetic
ctgctcctacctccaatacc

SEQ ID NO: 38359 - DNA, 20 bp, Artificial Sequence
  Synthetic
gtattccaggtattggaggt

SEQ ID NO: 38360 - DNA, 20 bp, Artificial Sequence
  Synthetic
ttaagtattccaggtattgg

SEQ ID NO: 38361 - DNA, 20 bp, Artificial Sequence
  Synthetic
ggcttaagtattccaggtat

SEQ ID NO: 38362 - DNA, 20 bp, Artificial Sequence
  Synthetic
ggttctggcttaagtattcc

SEQ ID NO: 38363 - DNA, 20 bp, Artificial Sequence
  Synthetic
cattaggtggaggacggttc

SEQ ID NO: 38364 - DNA, 20 bp, Artificial Sequence
  Synthetic
cataggcattaggtggagga

SEQ ID NO: 38365 - DNA, 20 bp, Artificial Sequence
  Synthetic
agttcataggcattaggtgg

SEQ ID NO: 38366 - DNA, 20 bp, Artificial Sequence
  Synthetic
aagagttcataggcattagg

SEQ ID NO: 38367 - DNA, 20 bp, Artificial Sequence
  Synthetic
gcaaagagttcataggcatt

SEQ ID NO: 38368 - DNA, 20 bp, Artificial Sequence
  Synthetic
tgcctatgaactctttgcca

SEQ ID NO: 38369 - DNA, 20 bp, Artificial Sequence
  Synthetic
gcctatgaactctttgccaa

SEQ ID NO: 38370 - DNA, 20 bp, Artificial Sequence
  Synthetic
gcccttggcaaagagttcat

SEQ ID NO: 38371 - DNA, 20 bp, Artificial Sequence
  Synthetic
cagatagtcttcatagccct

SEQ ID NO: 38372 - DNA, 20 bp, Artificial Sequence
  Synthetic
ctatctgcagtccccgcttc

SEQ ID NO: 38373 - DNA, 20 bp, Artificial Sequence
  Synthetic
tctgcagtccccgcttcagg

SEQ ID NO: 38374 - DNA, 20 bp, Artificial Sequence
  Synthetic
ctgcagtccccgcttcaggt

SEQ ID NO: 38375 - DNA, 20 bp, Artificial Sequence
  Synthetic
ctccagacccacctgaagcg

SEQ ID NO: 38376 - DNA, 20 bp, Artificial Sequence
  Synthetic
actccagacccacctgaagc

SEQ ID NO: 38377 - DNA, 20 bp, Artificial Sequence
  Synthetic
cactccagacccacctgaag

SEQ ID NO: 38378 - DNA, 20 bp, Artificial Sequence
  Synthetic
cctcattcatcagccactga

SEQ ID NO: 38379 - DNA, 20 bp, Artificial Sequence
  Synthetic
tcagccactgatggacaatc

SEQ ID NO: 38380 - DNA, 20 bp, Artificial Sequence
  Synthetic
gattccagattgtccatcag

SEQ ID NO: 38381 - DNA, 20 bp, Artificial Sequence
  Synthetic
gacatatgaagtgtttgaaa

SEQ ID NO: 38382 - DNA, 20 bp, Artificial Sequence
  Synthetic
ggtactgagagtatttgatg

SEQ ID NO: 38383 - DNA, 20 bp, Artificial Sequence
  Synthetic
tggtactgagagtatttgat

SEQ ID NO: 38384 - DNA, 20 bp, Artificial Sequence
  Synthetic
ctggtactgagagtatttga

SEQ ID NO: 38385 - DNA, 20 bp, Artificial Sequence
  Synthetic
caaatactctcagtaccagc

SEQ ID NO: 38386 - DNA, 20 bp, Artificial Sequence
  Synthetic
gggcaccacacagtacctgc

SEQ ID NO: 38387 - DNA, 20 bp, Artificial Sequence
  Synthetic
gcagacatttatagatggcc

SEQ ID NO: 38388 - DNA, 20 bp, Artificial Sequence
  Synthetic
gtctagcagacatttataga

SEQ ID NO: 38389 - DNA, 20 bp, Artificial Sequence
  Synthetic
gctagaccgagtaccagaag

SEQ ID NO: 38390 - DNA, 20 bp, Artificial Sequence
  Synthetic
ccttctcctcttctggtact

SEQ ID NO: 38391 - DNA, 20 bp, Artificial Sequence
  Synthetic
ccgagtaccagaagaggaga

SEQ ID NO: 38392 - DNA, 20 bp, Artificial Sequence
  Synthetic
ttggtatccttctcctcttc

SEQ ID NO: 38393 - DNA, 20 bp, Artificial Sequence
  Synthetic
ggaaagcactcactggacat

SEQ ID NO: 38394 - DNA, 20 bp, Artificial Sequence
  Synthetic
tttctttcttagggtactga

SEQ ID NO: 38395 - DNA, 20 bp, Artificial Sequence
  Synthetic
tcttagggtactgatggtgc

SEQ ID NO: 38396 - DNA, 20 bp, Artificial Sequence
  Synthetic
cttagggtactgatggtgct

SEQ ID NO: 38397 - DNA, 20 bp, Artificial Sequence
  Synthetic
gtactgatggtgctgggagc

SEQ ID NO: 38398 - DNA, 20 bp, Artificial Sequence
  Synthetic
tgatggtgctgggagcagga

SEQ ID NO: 38399 - DNA, 20 bp, Artificial Sequence
  Synthetic
gatggtgctgggagcaggac

SEQ ID NO: 38400 - DNA, 20 bp, Artificial Sequence
  Synthetic
atggtgctgggagcaggacg

SEQ ID NO: 38401 - DNA, 20 bp, Artificial Sequence
  Synthetic
gggagcaggacggggacccc

SEQ ID NO: 38402 - DNA, 20 bp, Artificial Sequence
  Synthetic
cgcagggaagcgttcaccag

SEQ ID NO: 38403 - DNA, 20 bp, Artificial Sequence
  Synthetic
ccgcagggaagcgttcacca

SEQ ID NO: 38404 - DNA, 20 bp, Artificial Sequence
  Synthetic
ccctggtgaacgcttccctg

SEQ ID NO: 38405 - DNA, 20 bp, Artificial Sequence
  Synthetic
cccgcagggaagcgttcacc

SEQ ID NO: 38406 - DNA, 20 bp, Artificial Sequence
  Synthetic
cctggtgaacgcttccctgc

SEQ ID NO: 38407 - DNA, 20 bp, Artificial Sequence
  Synthetic
ttccctgcgggcagccaagc

SEQ ID NO: 38408 - DNA, 20 bp, Artificial Sequence
  Synthetic
ggcctgcttggctgcccgca

SEQ ID NO: 38409 - DNA, 20 bp, Artificial Sequence
  Synthetic
cggcctgcttggctgcccgc

SEQ ID NO: 38410 - DNA, 20 bp, Artificial Sequence
  Synthetic
gggcagccaagcaggccgac

SEQ ID NO: 38411 - DNA, 20 bp, Artificial Sequence
  Synthetic
cagccaagcaggccgaccgg

SEQ ID NO: 38412 - DNA, 20 bp, Artificial Sequence
  Synthetic
tatccgccggtcggcctgct

SEQ ID NO: 38413 - DNA, 20 bp, Artificial Sequence
  Synthetic
atacagctttatccgccggt

SEQ ID NO: 38414 - DNA, 20 bp, Artificial Sequence
  Synthetic
cagcatacagctttatccgc

SEQ ID NO: 38415 - DNA, 20 bp, Artificial Sequence
  Synthetic
gcggataaagctgtatgctg

SEQ ID NO: 38416 - DNA, 20 bp, Artificial Sequence
  Synthetic
ggagaaaaacccaaatgccg

SEQ ID NO: 38417 - DNA, 20 bp, Artificial Sequence
  Synthetic
ctcacgtcaccacggcattt

SEQ ID NO: 38418 - DNA, 20 bp, Artificial Sequence
  Synthetic
actcacgtcaccacggcatt

SEQ ID NO: 38419 - DNA, 20 bp, Artificial Sequence
  Synthetic
ggttgctactcacgtcacca

SEQ ID NO: 38420 - DNA, 20 bp, Artificial Sequence
  Synthetic
tctgtttcaggctagagaac

SEQ ID NO: 38421 - DNA, 20 bp, Artificial Sequence
  Synthetic
agaactggcagtttgaagaa

SEQ ID NO: 38422 - DNA, 20 bp, Artificial Sequence
  Synthetic
gaactggcagtttgaagaat

SEQ ID NO: 38423 - DNA, 20 bp, Artificial Sequence
  Synthetic
aactggcagtttgaagaatg

SEQ ID NO: 38424 - DNA, 20 bp, Artificial Sequence
  Synthetic
ctgatgagactacggtcact

SEQ ID NO: 38425 - DNA, 20 bp, Artificial Sequence
  Synthetic
cctcatgtctgatgagacta

SEQ ID NO: 38426 - DNA, 20 bp, Artificial Sequence
  Synthetic
ccgtagtctcatcagacatg

SEQ ID NO: 38427 - DNA, 20 bp, Artificial Sequence
  Synthetic
cgtagtctcatcagacatga

SEQ ID NO: 38428 - DNA, 20 bp, Artificial Sequence
  Synthetic
tctcatcagacatgagggaa

SEQ ID NO: 38429 - DNA, 20 bp, Artificial Sequence
  Synthetic
ctcatcagacatgagggaat

SEQ ID NO: 38430 - DNA, 20 bp, Artificial Sequence
  Synthetic
atcagacatgagggaatggg

SEQ ID NO: 38431 - DNA, 20 bp, Artificial Sequence
  Synthetic
acaatgatgtctgctttctc

SEQ ID NO: 38432 - DNA, 20 bp, Artificial Sequence
  Synthetic
catcattgtcagtgagcttc

SEQ ID NO: 38433 - DNA, 20 bp, Artificial Sequence
  Synthetic
atcattgtcagtgagcttct

SEQ ID NO: 38434 - DNA, 20 bp, Artificial Sequence
  Synthetic
tgaattgtcgcctgagtgcc

SEQ ID NO: 38435 - DNA, 20 bp, Artificial Sequence
  Synthetic
ttgtcgcctgagtgcctgga

SEQ ID NO: 38436 - DNA, 20 bp, Artificial Sequence
  Synthetic
tgggctccatccaggcactc

SEQ ID NO: 38437 - DNA, 20 bp, Artificial Sequence
  Synthetic
ggaagtgctgggctccatcc

SEQ ID NO: 38438 - DNA, 20 bp, Artificial Sequence
  Synthetic
ggagcccagcacttcctaaa

SEQ ID NO: 38439 - DNA, 20 bp, Artificial Sequence
  Synthetic
ggcaccttttaggaagtgct

SEQ ID NO: 38440 - DNA, 20 bp, Artificial Sequence
  Synthetic
gggcaccttttaggaagtgc

SEQ ID NO: 38441 - DNA, 20 bp, Artificial Sequence
  Synthetic
ccaacctgggggcacctttt

SEQ ID NO: 38442 - DNA, 20 bp, Artificial Sequence
  Synthetic
ctctcctgctgtgcagatga

SEQ ID NO: 38443 - DNA, 20 bp, Artificial Sequence
  Synthetic
gatgatggtgtgagcatccc

SEQ ID NO: 38444 - DNA, 20 bp, Artificial Sequence
  Synthetic
atgatggtgtgagcatcccc

SEQ ID NO: 38445 - DNA, 20 bp, Artificial Sequence
  Synthetic
tgatggtgtgagcatccccg

SEQ ID NO: 38446 - DNA, 20 bp, Artificial Sequence
  Synthetic
gaaaggaagtgtactccccg

SEQ ID NO: 38447 - DNA, 20 bp, Artificial Sequence
  Synthetic
agaaaggaagtgtactcccc

SEQ ID NO: 38448 - DNA, 20 bp, Artificial Sequence
  Synthetic
cagaaaggaagtgtactccc

SEQ ID NO: 38449 - DNA, 20 bp, Artificial Sequence
  Synthetic
cggggagtacacttcctttc

SEQ ID NO: 38450 - DNA, 20 bp, Artificial Sequence
  Synthetic
ggaagagatgggagccagaa

SEQ ID NO: 38451 - DNA, 20 bp, Artificial Sequence
  Synthetic
tacagcttggaggaagagat

SEQ ID NO: 38452 - DNA, 20 bp, Artificial Sequence
  Synthetic
gtacagcttggaggaagaga

SEQ ID NO: 38453 - DNA, 20 bp, Artificial Sequence
  Synthetic
ttcctccaagctgtacaatg

SEQ ID NO: 38454 - DNA, 20 bp, Artificial Sequence
  Synthetic
gacctcattgtacagcttgg

SEQ ID NO: 38455 - DNA, 20 bp, Artificial Sequence
  Synthetic
tcggacctcattgtacagct

SEQ ID NO: 38456 - DNA, 20 bp, Artificial Sequence
  Synthetic
acaatgaggtccgagcctgt

SEQ ID NO: 38457 - DNA, 20 bp, Artificial Sequence
  Synthetic
caatgaggtccgagcctgta

SEQ ID NO: 38458 - DNA, 20 bp, Artificial Sequence
  Synthetic
ggtccgagcctgtagggaga

SEQ ID NO: 38459 - DNA, 20 bp, Artificial Sequence
  Synthetic
ggtccttctccctacaggct

SEQ ID NO: 38460 - DNA, 20 bp, Artificial Sequence
  Synthetic
gtcacggtccttctccctac

SEQ ID NO: 38461 - DNA, 20 bp, Artificial Sequence
  Synthetic
ggagaaggaccgtgaccctg

SEQ ID NO: 38462 - DNA, 20 bp, Artificial Sequence
  Synthetic
ggttctttacctcagggtca

SEQ ID NO: 38463 - DNA, 20 bp, Artificial Sequence
  Synthetic
gagagtggttctttacctca

SEQ ID NO: 38464 - DNA, 20 bp, Artificial Sequence
  Synthetic
agagagtggttctttacctc

SEQ ID NO: 38465 - DNA, 20 bp, Artificial Sequence
  Synthetic
cacataaggcatctcaaact

SEQ ID NO: 38466 - DNA, 20 bp, Artificial Sequence
  Synthetic
ccacataaggcatctcaaac

SEQ ID NO: 38467 - DNA, 20 bp, Artificial Sequence
  Synthetic
ccagtttgagatgccttatg

SEQ ID NO: 38468 - DNA, 20 bp, Artificial Sequence
  Synthetic
ttgagatgccttatgtggta

SEQ ID NO: 38469 - DNA, 20 bp, Artificial Sequence
  Synthetic
ttgtgcagccgtaccacata

SEQ ID NO: 38470 - DNA, 20 bp, Artificial Sequence
  Synthetic
gctggggtgcagagagctgg

SEQ ID NO: 38471 - DNA, 20 bp, Artificial Sequence
  Synthetic
agggctggggtgcagagagc

SEQ ID NO: 38472 - DNA, 20 bp, Artificial Sequence
  Synthetic
ctgaaggtgaaacagggctg

SEQ ID NO: 38473 - DNA, 20 bp, Artificial Sequence
  Synthetic
gctgaaggtgaaacagggct

SEQ ID NO: 38474 - DNA, 20 bp, Artificial Sequence
  Synthetic
ggctgaaggtgaaacagggc

SEQ ID NO: 38475 - DNA, 20 bp, Artificial Sequence
  Synthetic
ggatggctgaaggtgaaaca

SEQ ID NO: 38476 - DNA, 20 bp, Artificial Sequence
  Synthetic
gggatggctgaaggtgaaac

SEQ ID NO: 38477 - DNA, 20 bp, Artificial Sequence
  Synthetic
accttcagccatcccaacag

SEQ ID NO: 38478 - DNA, 20 bp, Artificial Sequence
  Synthetic
acctctgttgggatggctga

SEQ ID NO: 38479 - DNA, 20 bp, Artificial Sequence
  Synthetic
tcagccatcccaacagaggt

SEQ ID NO: 38480 - DNA, 20 bp, Artificial Sequence
  Synthetic
agaacctacctctgttggga

SEQ ID NO: 38481 - DNA, 20 bp, Artificial Sequence
  Synthetic
taaaagaacctacctctgtt

SEQ ID NO: 38482 - DNA, 20 bp, Artificial Sequence
  Synthetic
ataaaagaacctacctctgt

SEQ ID NO: 38483 - DNA, 20 bp, Artificial Sequence
  Synthetic
tagcggttgttgtcaatcat

SEQ ID NO: 38484 - DNA, 20 bp, Artificial Sequence
  Synthetic
caacaaccgctattgcacct

SEQ ID NO: 38485 - DNA, 20 bp, Artificial Sequence
  Synthetic
gaaattccaaggtgcaatag

SEQ ID NO: 38486 - DNA, 20 bp, Artificial Sequence
  Synthetic
ttgcaccttggaatttcctg

SEQ ID NO: 38487 - DNA, 20 bp, Artificial Sequence
  Synthetic
caccttggaatttcctgtgg

SEQ ID NO: 38488 - DNA, 20 bp, Artificial Sequence
  Synthetic
cacctccacaggaaattcca

SEQ ID NO: 38489 - DNA, 20 bp, Artificial Sequence
  Synthetic
agtactgtgttcacctccac

SEQ ID NO: 38490 - DNA, 20 bp, Artificial Sequence
  Synthetic
gaggtgaacacagtactaca

SEQ ID NO: 38491 - DNA, 20 bp, Artificial Sequence
  Synthetic
acagtactacatggctttgc

SEQ ID NO: 38492 - DNA, 20 bp, Artificial Sequence
  Synthetic
aagcacagtctcaaagtagc

SEQ ID NO: 38493 - DNA, 20 bp, Artificial Sequence
  Synthetic
ctttgagactgtgctttatc

SEQ ID NO: 38494 - DNA, 20 bp, Artificial Sequence
  Synthetic
caggagagtgagtctctgga

SEQ ID NO: 38495 - DNA, 20 bp, Artificial Sequence
  Synthetic
cgtccagagactcactctcc

SEQ ID NO: 38496 - DNA, 20 bp, Artificial Sequence
  Synthetic
gtccagagactcactctcct

SEQ ID NO: 38497 - DNA, 20 bp, Artificial Sequence
  Synthetic
atcccaggagagtgagtctc

SEQ ID NO: 38498 - DNA, 20 bp, Artificial Sequence
  Synthetic
actctcctgggatgttctca

SEQ ID NO: 38499 - DNA, 20 bp, Artificial Sequence
  Synthetic
ggaaaccatgagaacatccc

SEQ ID NO: 38500 - DNA, 20 bp, Artificial Sequence
  Synthetic
tcccatcctcttccctatta

SEQ ID NO: 38501 - DNA, 20 bp, Artificial Sequence
  Synthetic
accttaatagggaagaggat

SEQ ID NO: 38502 - DNA, 20 bp, Artificial Sequence
  Synthetic
taccttaatagggaagagga

SEQ ID NO: 38503 - DNA, 20 bp, Artificial Sequence
  Synthetic
atcctcttccctattaaggt

SEQ ID NO: 38504 - DNA, 20 bp, Artificial Sequence
  Synthetic
ttcctaccttaatagggaag

SEQ ID NO: 38505 - DNA, 20 bp, Artificial Sequence
  Synthetic
aagcagttcctaccttaata

SEQ ID NO: 38506 - DNA, 20 bp, Artificial Sequence
  Synthetic
aaagcagttcctaccttaat

SEQ ID NO: 38507 - DNA, 20 bp, Artificial Sequence
  Synthetic
cttcttacagcagcccataa

SEQ ID NO: 38508 - DNA, 20 bp, Artificial Sequence
  Synthetic
cagcccataacggtacgtga

SEQ ID NO: 38509 - DNA, 20 bp, Artificial Sequence
  Synthetic
tggccttcacgtaccgttat

SEQ ID NO: 38510 - DNA, 20 bp, Artificial Sequence
  Synthetic
ttggccttcacgtaccgtta

SEQ ID NO: 38511 - DNA, 20 bp, Artificial Sequence
  Synthetic
agaaacgcacacagatggtt

SEQ ID NO: 38512 - DNA, 20 bp, Artificial Sequence
  Synthetic
aaaccatctgtgtgcgtttc

SEQ ID NO: 38513 - DNA, 20 bp, Artificial Sequence
  Synthetic
tcgccagaaacgcacacaga

SEQ ID NO: 38514 - DNA, 20 bp, Artificial Sequence
  Synthetic
gcgatgcagcaattccaaga

SEQ ID NO: 38515 - DNA, 20 bp, Artificial Sequence
  Synthetic
gcagcaattccaagaaggtg

SEQ ID NO: 38516 - DNA, 20 bp, Artificial Sequence
  Synthetic
ccactcataccacaccttct

SEQ ID NO: 38517 - DNA, 20 bp, Artificial Sequence
  Synthetic
ccaagaaggtgtggtatgag

SEQ ID NO: 38518 - DNA, 20 bp, Artificial Sequence
  Synthetic
caagaaggtgtggtatgagt

SEQ ID NO: 38519 - DNA, 20 bp, Artificial Sequence
  Synthetic
tcgtttgtacaaattccaca

SEQ ID NO: 38520 - DNA, 20 bp, Artificial Sequence
  Synthetic
ttgtggaatttgtacaaacg

SEQ ID NO: 38521 - DNA, 20 bp, Artificial Sequence
  Synthetic
aaacgaggtgaacgatgatc

SEQ ID NO: 38522 - DNA, 20 bp, Artificial Sequence
  Synthetic
tcaggatgccatcttatgtg

SEQ ID NO: 38523 - DNA, 20 bp, Artificial Sequence
  Synthetic
acaagaggcctcacataaga

SEQ ID NO: 38524 - DNA, 20 bp, Artificial Sequence
  Synthetic
gtgaggcctcttgtcagaaa

SEQ ID NO: 38525 - DNA, 20 bp, Artificial Sequence
  Synthetic
atgaaaccatttctgacaag

SEQ ID NO: 38526 - DNA, 20 bp, Artificial Sequence
  Synthetic
cttgtcagaaatggtttcat

SEQ ID NO: 38527 - DNA, 20 bp, Artificial Sequence
  Synthetic
tggtttcatcggatctgtac

SEQ ID NO: 38528 - DNA, 20 bp, Artificial Sequence
  Synthetic
ggaatgactgaaacagctta

SEQ ID NO: 38529 - DNA, 20 bp, Artificial Sequence
  Synthetic
cagatgcttctgcagttaag

SEQ ID NO: 38530 - DNA, 20 bp, Artificial Sequence
  Synthetic
ctgcagaagcatctgcagta

SEQ ID NO: 38531 - DNA, 20 bp, Artificial Sequence
  Synthetic
tgcagaagcatctgcagtat

SEQ ID NO: 38532 - DNA, 20 bp, Artificial Sequence
  Synthetic
gcagaagcatctgcagtatg

SEQ ID NO: 38533 - DNA, 20 bp, Artificial Sequence
  Synthetic
atggggctgtgatacctgta

SEQ ID NO: 38534 - DNA, 20 bp, Artificial Sequence
  Synthetic
gacatctttgtcagccatac

SEQ ID NO: 38535 - DNA, 20 bp, Artificial Sequence
  Synthetic
tgtacccatgtggtgcctgt

SEQ ID NO: 38536 - DNA, 20 bp, Artificial Sequence
  Synthetic
cactccgacaggcaccacat

SEQ ID NO: 38537 - DNA, 20 bp, Artificial Sequence
  Synthetic
tcactccgacaggcaccaca

SEQ ID NO: 38538 - DNA, 20 bp, Artificial Sequence
  Synthetic
atgtggtgcctgtcggagtg

SEQ ID NO: 38539 - DNA, 20 bp, Artificial Sequence
  Synthetic
atcgttcacctcactccgac

SEQ ID NO: 38540 - DNA, 20 bp, Artificial Sequence
  Synthetic
gagtgaggtgaacgatgacc

SEQ ID NO: 38541 - DNA, 20 bp, Artificial Sequence
  Synthetic
cctcacacagaatggcatcc

SEQ ID NO: 38542 - DNA, 20 bp, Artificial Sequence
  Synthetic
ccaggatgccattctgtgtg

SEQ ID NO: 38543 - DNA, 20 bp, Artificial Sequence
  Synthetic
gcaggaggcctcacacagaa

SEQ ID NO: 38544 - DNA, 20 bp, Artificial Sequence
  Synthetic
gtgaggcctcctgccagaaa

SEQ ID NO: 38545 - DNA, 20 bp, Artificial Sequence
  Synthetic
gtggaaccatttctggcagg

SEQ ID NO: 38546 - DNA, 20 bp, Artificial Sequence
  Synthetic
acggtggaaccatttctggc

SEQ ID NO: 38547 - DNA, 20 bp, Artificial Sequence
  Synthetic
actcacggtggaaccatttc

SEQ ID NO: 38548 - DNA, 20 bp, Artificial Sequence
  Synthetic
tggttccaccgtgagtgcac

SEQ ID NO: 38549 - DNA, 20 bp, Artificial Sequence
  Synthetic
tcatgcctgtgcactcacgg

SEQ ID NO: 38550 - DNA, 20 bp, Artificial Sequence
  Synthetic
cagtcatgcctgtgcactca

SEQ ID NO: 38551 - DNA, 20 bp, Artificial Sequence
  Synthetic
ggcatgactgagagcgccta

SEQ ID NO: 38552 - DNA, 20 bp, Artificial Sequence
  Synthetic
gcatgactgagagcgcctat

SEQ ID NO: 38553 - DNA, 20 bp, Artificial Sequence
  Synthetic
ttcagtggtcagcagcccat

SEQ ID NO: 38554 - DNA, 20 bp, Artificial Sequence
  Synthetic
ccagacggcagaagcttcag

SEQ ID NO: 38555 - DNA, 20 bp, Artificial Sequence
  Synthetic
ccactgaagcttctgccgtc

SEQ ID NO: 38556 - DNA, 20 bp, Artificial Sequence
  Synthetic
cactgaagcttctgccgtct

SEQ ID NO: 38557 - DNA, 20 bp, Artificial Sequence
  Synthetic
gcagagatcgcaggcccaga

SEQ ID NO: 38558 - DNA, 20 bp, Artificial Sequence
  Synthetic
ggtcttgaggcagagatcgc

SEQ ID NO: 38559 - DNA, 20 bp, Artificial Sequence
  Synthetic
tttgcggcctcatcagagag

SEQ ID NO: 38560 - DNA, 20 bp, Artificial Sequence
  Synthetic
tcatttacctctctctgatg

SEQ ID NO: 38561 - DNA, 20 bp, Artificial Sequence
  Synthetic
tctagggagtgaaattcctg

SEQ ID NO: 38562 - DNA, 20 bp, Artificial Sequence
  Synthetic
ctagggagtgaaattcctgt

SEQ ID NO: 38563 - DNA, 20 bp, Artificial Sequence
  Synthetic
gactggtgacacactcccac

SEQ ID NO: 38564 - DNA, 20 bp, Artificial Sequence
  Synthetic
tgtgggagtgtgtcaccagt

SEQ ID NO: 38565 - DNA, 20 bp, Artificial Sequence
  Synthetic
gtcaccagtcggcgcatccc

SEQ ID NO: 38566 - DNA, 20 bp, Artificial Sequence
  Synthetic
gctgccagggatgcgccgac

SEQ ID NO: 38567 - DNA, 20 bp, Artificial Sequence
  Synthetic
cggcgcatccctggcagcca

SEQ ID NO: 38568 - DNA, 20 bp, Artificial Sequence
  Synthetic
tgatgcagccatggctgcca

SEQ ID NO: 38569 - DNA, 20 bp, Artificial Sequence
  Synthetic
atgatgcagccatggctgcc

SEQ ID NO: 38570 - DNA, 20 bp, Artificial Sequence
  Synthetic
tggcagccatggctgcatca

SEQ ID NO: 38571 - DNA, 20 bp, Artificial Sequence
  Synthetic
catcagccatgatgcagcca

SEQ ID NO: 38572 - DNA, 20 bp, Artificial Sequence
  Synthetic
ctgcatcatggctgatgaga

SEQ ID NO: 38573 - DNA, 20 bp, Artificial Sequence
  Synthetic
tgcatcatggctgatgagat

SEQ ID NO: 38574 - DNA, 20 bp, Artificial Sequence
  Synthetic
atggctgatgagatgggcct

SEQ ID NO: 38575 - DNA, 20 bp, Artificial Sequence
  Synthetic
tgcactgcagcgtctttcct

SEQ ID NO: 38576 - DNA, 20 bp, Artificial Sequence
  Synthetic
tgcagtgcatcacattgatg

SEQ ID NO: 38577 - DNA, 20 bp, Artificial Sequence
  Synthetic
ctggcttgcactctggactc

SEQ ID NO: 38578 - DNA, 20 bp, Artificial Sequence
  Synthetic
tcaatttctggcttgcactc

SEQ ID NO: 38579 - DNA, 20 bp, Artificial Sequence
  Synthetic
gtgcaagccagaaattgaca

SEQ ID NO: 38580 - DNA, 20 bp, Artificial Sequence
  Synthetic
gccagaaattgacaaggcag

SEQ ID NO: 38581 - DNA, 20 bp, Artificial Sequence
  Synthetic
accactgccttgtcaatttc

SEQ ID NO: 38582 - DNA, 20 bp, Artificial Sequence
  Synthetic
agaaattgacaaggcagtgg

SEQ ID NO: 38583 - DNA, 20 bp, Artificial Sequence
  Synthetic
ggtggtgtcgccttccagcc

SEQ ID NO: 38584 - DNA, 20 bp, Artificial Sequence
  Synthetic
cagttcttcaccaggctgga

SEQ ID NO: 38585 - DNA, 20 bp, Artificial Sequence
  Synthetic
cttccagcctggtgaagaac

SEQ ID NO: 38586 - DNA, 20 bp, Artificial Sequence
  Synthetic
gtaccagttcttcaccaggc

SEQ ID NO: 38587 - DNA, 20 bp, Artificial Sequence
  Synthetic
cattgtaccagttcttcacc

SEQ ID NO: 38588 - DNA, 20 bp, Artificial Sequence
  Synthetic
ggtgaagaactggtacaatg

SEQ ID NO: 38589 - DNA, 20 bp, Artificial Sequence
  Synthetic
aagaactggtacaatgaggt

SEQ ID NO: 38590 - DNA, 20 bp, Artificial Sequence
  Synthetic
agaactggtacaatgaggtt

SEQ ID NO: 38591 - DNA, 20 bp, Artificial Sequence
  Synthetic
ggtacaatgaggttgggaaa

SEQ ID NO: 38592 - DNA, 20 bp, Artificial Sequence
  Synthetic
aatgaggttgggaaatggct

SEQ ID NO: 38593 - DNA, 20 bp, Artificial Sequence
  Synthetic
gaggttgggaaatggctcgg

SEQ ID NO: 38594 - DNA, 20 bp, Artificial Sequence
  Synthetic
aggttgggaaatggctcgga

SEQ ID NO: 38595 - DNA, 20 bp, Artificial Sequence
  Synthetic
ttgggaaatggctcggaggg

SEQ ID NO: 38596 - DNA, 20 bp, Artificial Sequence
  Synthetic
cggagggaggatccaacctc

SEQ ID NO: 38597 - DNA, 20 bp, Artificial Sequence
  Synthetic
atccaacctctggccatcga

SEQ ID NO: 38598 - DNA, 20 bp, Artificial Sequence
  Synthetic
ctccatcgatggccagaggt

SEQ ID NO: 38599 - DNA, 20 bp, Artificial Sequence
  Synthetic
caacctctggccatcgatgg

SEQ ID NO: 38600 - DNA, 20 bp, Artificial Sequence
  Synthetic
gatcctccatcgatggccag

SEQ ID NO: 38601 - DNA, 20 bp, Artificial Sequence
  Synthetic
ggccatcgatggaggatcta

SEQ ID NO: 38602 - DNA, 20 bp, Artificial Sequence
  Synthetic
atccttagatcctccatcga

SEQ ID NO: 38603 - DNA, 20 bp, Artificial Sequence
  Synthetic
ggatgaaatagaccaaaagc

SEQ ID NO: 38604 - DNA, 20 bp, Artificial Sequence
  Synthetic
gatgaaatagaccaaaagct

SEQ ID NO: 38605 - DNA, 20 bp, Artificial Sequence
  Synthetic
agggctccgtacccagcttt

SEQ ID NO: 38606 - DNA, 20 bp, Artificial Sequence
  Synthetic
gaaggattcatgaaccagcg

SEQ ID NO: 38607 - DNA, 20 bp, Artificial Sequence
  Synthetic
tcatgaaccagcgtggagcc

SEQ ID NO: 38608 - DNA, 20 bp, Artificial Sequence
  Synthetic
catgaaccagcgtggagcca

SEQ ID NO: 38609 - DNA, 20 bp, Artificial Sequence
  Synthetic
aagacaccctggctccacgc

SEQ ID NO: 38610 - DNA, 20 bp, Artificial Sequence
  Synthetic
gaggatgggagaagacaccc

SEQ ID NO: 38611 - DNA, 20 bp, Artificial Sequence
  Synthetic
tcataggaaatgatgaggat

SEQ ID NO: 38612 - DNA, 20 bp, Artificial Sequence
  Synthetic
ctcataggaaatgatgagga

SEQ ID NO: 38613 - DNA, 20 bp, Artificial Sequence
  Synthetic
aggtctcataggaaatgatg

SEQ ID NO: 38614 - DNA, 20 bp, Artificial Sequence
  Synthetic
atgaaggcggaaggtctcat

SEQ ID NO: 38615 - DNA, 20 bp, Artificial Sequence
  Synthetic
gagaccttccgccttcatgt

SEQ ID NO: 38616 - DNA, 20 bp, Artificial Sequence
  Synthetic
gactccaacatgaaggcgga

SEQ ID NO: 38617 - DNA, 20 bp, Artificial Sequence
  Synthetic
ggaggactccaacatgaagg

SEQ ID NO: 38618 - DNA, 20 bp, Artificial Sequence
  Synthetic
tctggaggactccaacatga

SEQ ID NO: 38619 - DNA, 20 bp, Artificial Sequence
  Synthetic
catgttggagtcctccagaa

SEQ ID NO: 38620 - DNA, 20 bp, Artificial Sequence
  Synthetic
gtcctccagaaaggaagtgt

SEQ ID NO: 38621 - DNA, 20 bp, Artificial Sequence
  Synthetic
gaccaacacttcctttctgg

SEQ ID NO: 38622 - DNA, 20 bp, Artificial Sequence
  Synthetic
ccagaccaacacttcctttc

SEQ ID NO: 38623 - DNA, 20 bp, Artificial Sequence
  Synthetic
ccagaaaggaagtgttggtc

SEQ ID NO: 38624 - DNA, 20 bp, Artificial Sequence
  Synthetic
tggtctggtcatatgtgacg

SEQ ID NO: 38625 - DNA, 20 bp, Artificial Sequence
  Synthetic
ggattctcttgcagggacac

SEQ ID NO: 38626 - DNA, 20 bp, Artificial Sequence
  Synthetic
gaatcagacttaccaagccc

SEQ ID NO: 38627 - DNA, 20 bp, Artificial Sequence
  Synthetic
tgttcaagctgtccagggct

SEQ ID NO: 38628 - DNA, 20 bp, Artificial Sequence
  Synthetic
gctggtgttcaagctgtcca

SEQ ID NO: 38629 - DNA, 20 bp, Artificial Sequence
  Synthetic
ggctggtgttcaagctgtcc

SEQ ID NO: 38630 - DNA, 20 bp, Artificial Sequence
  Synthetic
tggacagcttgaacaccagc

SEQ ID NO: 38631 - DNA, 20 bp, Artificial Sequence
  Synthetic
acagcttgaacaccagccgg

SEQ ID NO: 38632 - DNA, 20 bp, Artificial Sequence
  Synthetic
cagcttgaacaccagccggc

SEQ ID NO: 38633 - DNA, 20 bp, Artificial Sequence
  Synthetic
ggagatgagcacccgccggc

SEQ ID NO: 38634 - DNA, 20 bp, Artificial Sequence
  Synthetic
agccggcgggtgctcatctc

SEQ ID NO: 38635 - DNA, 20 bp, Artificial Sequence
  Synthetic
ttccggagatgagcacccgc

SEQ ID NO: 38636 - DNA, 20 bp, Artificial Sequence
  Synthetic
atcattctggatgggagttc

SEQ ID NO: 38637 - DNA, 20 bp, Artificial Sequence
  Synthetic
tcaagcagatcattctggat

SEQ ID NO: 38638 - DNA, 20 bp, Artificial Sequence
  Synthetic
ctcaagcagatcattctgga

SEQ ID NO: 38639 - DNA, 20 bp, Artificial Sequence
  Synthetic
aatactcaagcagatcattc

SEQ ID NO: 38640 - DNA, 20 bp, Artificial Sequence
  Synthetic
tctgcttgagtatttcagct

SEQ ID NO: 38641 - DNA, 20 bp, Artificial Sequence
  Synthetic
ttggtacattttgttaattc

SEQ ID NO: 38642 - DNA, 20 bp, Artificial Sequence
  Synthetic
tttgttaattccggcatcct

SEQ ID NO: 38643 - DNA, 20 bp, Artificial Sequence
  Synthetic
tagattcttacctaggatgc

SEQ ID NO: 38644 - DNA, 20 bp, Artificial Sequence
  Synthetic
aaaatgcttcttgaattcat

SEQ ID NO: 38645 - DNA, 20 bp, Artificial Sequence
  Synthetic
caaaatgcttcttgaattca

SEQ ID NO: 38646 - DNA, 20 bp, Artificial Sequence
  Synthetic
ttttgaattgccaattttga

SEQ ID NO: 38647 - DNA, 20 bp, Artificial Sequence
  Synthetic
tttgaattgccaattttgaa

SEQ ID NO: 38648 - DNA, 20 bp, Artificial Sequence
  Synthetic
gcgtctcgacccttcaaaat

SEQ ID NO: 38649 - DNA, 20 bp, Artificial Sequence
  Synthetic
tcgagacgctgctgctagtg

SEQ ID NO: 38650 - DNA, 20 bp, Artificial Sequence
  Synthetic
ctgctgctagtgaggcagac

SEQ ID NO: 38651 - DNA, 20 bp, Artificial Sequence
  Synthetic
agtgaggcagacaggcagct

SEQ ID NO: 38652 - DNA, 20 bp, Artificial Sequence
  Synthetic
ggcagacaggcagctaggag

SEQ ID NO: 38653 - DNA, 20 bp, Artificial Sequence
  Synthetic
acaggcagctaggagaggag

SEQ ID NO: 38654 - DNA, 20 bp, Artificial Sequence
  Synthetic
agctaggagaggagcggctg

SEQ ID NO: 38655 - DNA, 20 bp, Artificial Sequence
  Synthetic
gctaggagaggagcggctgc

SEQ ID NO: 38656 - DNA, 20 bp, Artificial Sequence
  Synthetic
agctcaccagcattgtgaat

SEQ ID NO: 38657 - DNA, 20 bp, Artificial Sequence
  Synthetic
tcattacctattcacaatgc

SEQ ID NO: 38658 - DNA, 20 bp, Artificial Sequence
  Synthetic
ttttctctagatgcctgata

SEQ ID NO: 38659 - DNA, 20 bp, Artificial Sequence
  Synthetic
tctctagatgcctgatacgg

SEQ ID NO: 38660 - DNA, 20 bp, Artificial Sequence
  Synthetic
tatcagaagtcctccgtatc

SEQ ID NO: 38661 - DNA, 20 bp, Artificial Sequence
  Synthetic
tcacaggcagatatttagaa

SEQ ID NO: 38662 - DNA, 20 bp, Artificial Sequence
  Synthetic
tctgcctgtgaagattgagc

SEQ ID NO: 38663 - DNA, 20 bp, Artificial Sequence
  Synthetic
acgacctgctcaatcttcac

SEQ ID NO: 38664 - DNA, 20 bp, Artificial Sequence
  Synthetic
ttgagcaggtcgtttgttgt

SEQ ID NO: 38665 - DNA, 20 bp, Artificial Sequence
  Synthetic
ttgtataactcagtctgaag

SEQ ID NO: 38666 - DNA, 20 bp, Artificial Sequence
  Synthetic
cttgtataactcagtctgaa

SEQ ID NO: 38667 - DNA, 20 bp, Artificial Sequence
  Synthetic
tcttgtataactcagtctga

SEQ ID NO: 38668 - DNA, 20 bp, Artificial Sequence
  Synthetic
ttcagactgagttatacaag

SEQ ID NO: 38669 - DNA, 20 bp, Artificial Sequence
  Synthetic
gtttctgagacaagccaaac

SEQ ID NO: 38670 - DNA, 20 bp, Artificial Sequence
  Synthetic
aagcaattcttctgccggtt

SEQ ID NO: 38671 - DNA, 20 bp, Artificial Sequence
  Synthetic
accggcagaagaattgcttg

SEQ ID NO: 38672 - DNA, 20 bp, Artificial Sequence
  Synthetic
ccctcaagcaattcttctgc

SEQ ID NO: 38673 - DNA, 20 bp, Artificial Sequence
  Synthetic
ccggcagaagaattgcttga

SEQ ID NO: 38674 - DNA, 20 bp, Artificial Sequence
  Synthetic
tagcgaggtgatggaagaaa

SEQ ID NO: 38675 - DNA, 20 bp, Artificial Sequence
  Synthetic
ttagcgaggtgatggaagaa

SEQ ID NO: 38676 - DNA, 20 bp, Artificial Sequence
  Synthetic
aagcttctttagcgaggtga

SEQ ID NO: 38677 - DNA, 20 bp, Artificial Sequence
  Synthetic
attacaaagcttctttagcg

SEQ ID NO: 38678 - DNA, 20 bp, Artificial Sequence
  Synthetic
tcatagattagagctggatc

SEQ ID NO: 38679 - DNA, 20 bp, Artificial Sequence
  Synthetic
cacttatcatagattagagc

SEQ ID NO: 38680 - DNA, 20 bp, Artificial Sequence
  Synthetic
acgggctgtgaaacctcatc

SEQ ID NO: 38681 - DNA, 20 bp, Artificial Sequence
  Synthetic
aaggtttgctgtacctgatg

SEQ ID NO: 38682 - DNA, 20 bp, Artificial Sequence
  Synthetic
tttgtcccttgtcagattgg

SEQ ID NO: 38683 - DNA, 20 bp, Artificial Sequence
  Synthetic
ttgtcccttgtcagattggc

SEQ ID NO: 38684 - DNA, 20 bp, Artificial Sequence
  Synthetic
cttgtcagattggcgggatc

SEQ ID NO: 38685 - DNA, 20 bp, Artificial Sequence
  Synthetic
ctaggttatcgtaaaggaac

SEQ ID NO: 38686 - DNA, 20 bp, Artificial Sequence
  Synthetic
gttcctttacgataacctag

SEQ ID NO: 38687 - DNA, 20 bp, Artificial Sequence
  Synthetic
actccactaggttatcgtaa

SEQ ID NO: 38688 - DNA, 20 bp, Artificial Sequence
  Synthetic
cgataacctagtggagtctc

SEQ ID NO: 38689 - DNA, 20 bp, Artificial Sequence
  Synthetic
acctagtggagtctctggag

SEQ ID NO: 38690 - DNA, 20 bp, Artificial Sequence
  Synthetic
acctctccagagactccact

SEQ ID NO: 38691 - DNA, 20 bp, Artificial Sequence
  Synthetic
gagaggtttaagaccagcag

SEQ ID NO: 38692 - DNA, 20 bp, Artificial Sequence
  Synthetic
tttaagaccagcagtggctt

SEQ ID NO: 38693 - DNA, 20 bp, Artificial Sequence
  Synthetic
aatacagccaaagccactgc

SEQ ID NO: 38694 - DNA, 20 bp, Artificial Sequence
  Synthetic
cagtggctttggctgtattc

SEQ ID NO: 38695 - DNA, 20 bp, Artificial Sequence
  Synthetic
ctgtattctggcccacagca

SEQ ID NO: 38696 - DNA, 20 bp, Artificial Sequence
  Synthetic
tgtattctggcccacagcat

SEQ ID NO: 38697 - DNA, 20 bp, Artificial Sequence
  Synthetic
tctggcccacagcatgggtc

SEQ ID NO: 38698 - DNA, 20 bp, Artificial Sequence
  Synthetic
ctggcccacagcatgggtct

SEQ ID NO: 38699 - DNA, 20 bp, Artificial Sequence
  Synthetic
tggcccacagcatgggtctg

SEQ ID NO: 38700 - DNA, 20 bp, Artificial Sequence
  Synthetic
tttccccagacccatgctgt

SEQ ID NO: 38701 - DNA, 20 bp, Artificial Sequence
  Synthetic
ttttccccagacccatgctg

SEQ ID NO: 38702 - DNA, 20 bp, Artificial Sequence
  Synthetic
tggctggcgtgtggcggaag

SEQ ID NO: 38703 - DNA, 20 bp, Artificial Sequence
  Synthetic
ctgttttggctggcgtgtgg

SEQ ID NO: 38704 - DNA, 20 bp, Artificial Sequence
  Synthetic
ggactgttttggctggcgtg

SEQ ID NO: 38705 - DNA, 20 bp, Artificial Sequence
  Synthetic
atggcaaggactgttttggc

SEQ ID NO: 38706 - DNA, 20 bp, Artificial Sequence
  Synthetic
cacaatggcaaggactgttt

SEQ ID NO: 38707 - DNA, 20 bp, Artificial Sequence
  Synthetic
aacagtccttgccattgtgc

SEQ ID NO: 38708 - DNA, 20 bp, Artificial Sequence
  Synthetic
ctcttaccggcacaatggca

SEQ ID NO: 38709 - DNA, 20 bp, Artificial Sequence
  Synthetic
aaaaactcttaccggcacaa

SEQ ID NO: 38710 - DNA, 20 bp, Artificial Sequence
  Synthetic
aggttaatactcttcagaat

SEQ ID NO: 38711 - DNA, 20 bp, Artificial Sequence
  Synthetic
taatactcttcagaattggc

SEQ ID NO: 38712 - DNA, 20 bp, Artificial Sequence
  Synthetic
ggctggcagagttcaacatg

SEQ ID NO: 38713 - DNA, 20 bp, Artificial Sequence
  Synthetic
tccacctcctgaagccctcc

SEQ ID NO: 38714 - DNA, 20 bp, Artificial Sequence
  Synthetic
gccgggagggcttcaggagg

SEQ ID NO: 38715 - DNA, 20 bp, Artificial Sequence
  Synthetic
tcagccgggagggcttcagg

SEQ ID NO: 38716 - DNA, 20 bp, Artificial Sequence
  Synthetic
ttgtcagccgggagggcttc

SEQ ID NO: 38717 - DNA, 20 bp, Artificial Sequence
  Synthetic
aggcttgttgtcagccggga

SEQ ID NO: 38718 - DNA, 20 bp, Artificial Sequence
  Synthetic
caggcttgttgtcagccggg

SEQ ID NO: 38719 - DNA, 20 bp, Artificial Sequence
  Synthetic
cttcaggcttgttgtcagcc

SEQ ID NO: 38720 - DNA, 20 bp, Artificial Sequence
  Synthetic
tcttcaggcttgttgtcagc

SEQ ID NO: 38721 - DNA, 20 bp, Artificial Sequence
  Synthetic
agcctgaagaagtccagcct

SEQ ID NO: 38722 - DNA, 20 bp, Artificial Sequence
  Synthetic
aaccgaggctggacttcttc

SEQ ID NO: 38723 - DNA, 20 bp, Artificial Sequence
  Synthetic
gaactttaaagaaccgaggc

SEQ ID NO: 38724 - DNA, 20 bp, Artificial Sequence
  Synthetic
atgtgaactttaaagaaccg

SEQ ID NO: 38725 - DNA, 20 bp, Artificial Sequence
  Synthetic
cttgaatgatgagcacaagt

SEQ ID NO: 38726 - DNA, 20 bp, Artificial Sequence
  Synthetic
ctgttcatcttgcaggacga

SEQ ID NO: 38727 - DNA, 20 bp, Artificial Sequence
  Synthetic
ggcatctcgtgctaaagtga

SEQ ID NO: 38728 - DNA, 20 bp, Artificial Sequence
  Synthetic
gtgctaaagtgatggctgat

SEQ ID NO: 38729 - DNA, 20 bp, Artificial Sequence
  Synthetic
tgctaaagtgatggctgatt

SEQ ID NO: 38730 - DNA, 20 bp, Artificial Sequence
  Synthetic
gatggctgattgggtgtcag

SEQ ID NO: 38731 - DNA, 20 bp, Artificial Sequence
  Synthetic
atggctgattgggtgtcaga

SEQ ID NO: 38732 - DNA, 20 bp, Artificial Sequence
  Synthetic
gctgattgggtgtcagaggg

SEQ ID NO: 38733 - DNA, 20 bp, Artificial Sequence
  Synthetic
agagggtggcgtgctgctga

SEQ ID NO: 38734 - DNA, 20 bp, Artificial Sequence
  Synthetic
gagggtggcgtgctgctgat

SEQ ID NO: 38735 - DNA, 20 bp, Artificial Sequence
  Synthetic
agggtggcgtgctgctgatg

SEQ ID NO: 38736 - DNA, 20 bp, Artificial Sequence
  Synthetic
caaatgatttcttcagagtg

SEQ ID NO: 38737 - DNA, 20 bp, Artificial Sequence
  Synthetic
ctgaagaaatcatttgccac

SEQ ID NO: 38738 - DNA, 20 bp, Artificial Sequence
  Synthetic
ggttttcttcggtctacctg

SEQ ID NO: 38739 - DNA, 20 bp, Artificial Sequence
  Synthetic
gaacgcttcttggttttctt

SEQ ID NO: 38740 - DNA, 20 bp, Artificial Sequence
  Synthetic
gactgggtgagaacgcttct

SEQ ID NO: 38741 - DNA, 20 bp, Artificial Sequence
  Synthetic
catctagatcaatgatgact

SEQ ID NO: 38742 - DNA, 20 bp, Artificial Sequence
  Synthetic
tcatctagatcaatgatgac

SEQ ID NO: 38743 - DNA, 20 bp, Artificial Sequence
  Synthetic
agtcatcattgatctagatg

SEQ ID NO: 38744 - DNA, 20 bp, Artificial Sequence
  Synthetic
ttgatctagatgaggaagat

SEQ ID NO: 38745 - DNA, 20 bp, Artificial Sequence
  Synthetic
agatgaggaagatcggcagc

SEQ ID NO: 38746 - DNA, 20 bp, Artificial Sequence
  Synthetic
aagatcggcagcaggagttt

SEQ ID NO: 38747 - DNA, 20 bp, Artificial Sequence
  Synthetic
cggcagcaggagtttcggag

SEQ ID NO: 38748 - DNA, 20 bp, Artificial Sequence
  Synthetic
cagcaggagtttcggagagg

SEQ ID NO: 38749 - DNA, 20 bp, Artificial Sequence
  Synthetic
agcaggagtttcggagaggt

SEQ ID NO: 38750 - DNA, 20 bp, Artificial Sequence
  Synthetic
tccctccctagagtttgaga

SEQ ID NO: 38751 - DNA, 20 bp, Artificial Sequence
  Synthetic
gagaaggctttatgccgccc

SEQ ID NO: 38752 - DNA, 20 bp, Artificial Sequence
  Synthetic
ttactacatcagggccaggg

SEQ ID NO: 38753 - DNA, 20 bp, Artificial Sequence
  Synthetic
agattactacatcagggcca

SEQ ID NO: 38754 - DNA, 20 bp, Artificial Sequence
  Synthetic
cagattactacatcagggcc

SEQ ID NO: 38755 - DNA, 20 bp, Artificial Sequence
  Synthetic
catcacagattactacatca

SEQ ID NO: 38756 - DNA, 20 bp, Artificial Sequence
  Synthetic
tcatcacagattactacatc

SEQ ID NO: 38757 - DNA, 20 bp, Artificial Sequence
  Synthetic
tgatgtagtaatctgtgatg

SEQ ID NO: 38758 - DNA, 20 bp, Artificial Sequence
  Synthetic
gatgtagtaatctgtgatga

SEQ ID NO: 38759 - DNA, 20 bp, Artificial Sequence
  Synthetic
acaccgcatcaaaaactgcc

SEQ ID NO: 38760 - DNA, 20 bp, Artificial Sequence
  Synthetic
tggcctggcagtttttgatg

SEQ ID NO: 38761 - DNA, 20 bp, Artificial Sequence
  Synthetic
ctgccaggccagcacctcac

SEQ ID NO: 38762 - DNA, 20 bp, Artificial Sequence
  Synthetic
gagcctgtgaggtgctggcc

SEQ ID NO: 38763 - DNA, 20 bp, Artificial Sequence
  Synthetic
cttcagagcctgtgaggtgc

SEQ ID NO: 38764 - DNA, 20 bp, Artificial Sequence
  Synthetic
gatattcttcagagcctgtg

SEQ ID NO: 38765 - DNA, 20 bp, Artificial Sequence
  Synthetic
agaatatccgctctcgccgc

SEQ ID NO: 38766 - DNA, 20 bp, Artificial Sequence
  Synthetic
gaatatccgctctcgccgcc

SEQ ID NO: 38767 - DNA, 20 bp, Artificial Sequence
  Synthetic
tatccgctctcgccgccggg

SEQ ID NO: 38768 - DNA, 20 bp, Artificial Sequence
  Synthetic
gcaccacccggcggcgagag

SEQ ID NO: 38769 - DNA, 20 bp, Artificial Sequence
  Synthetic
cgccgccgggtggtgctgac

SEQ ID NO: 38770 - DNA, 20 bp, Artificial Sequence
  Synthetic
gccgccgggtggtgctgact

SEQ ID NO: 38771 - DNA, 20 bp, Artificial Sequence
  Synthetic
acccagtcagcaccacccgg

SEQ ID NO: 38772 - DNA, 20 bp, Artificial Sequence
  Synthetic
ggtacccagtcagcaccacc

SEQ ID NO: 38773 - DNA, 20 bp, Artificial Sequence
  Synthetic
caatgaggttgttttgcaga

SEQ ID NO: 38774 - DNA, 20 bp, Artificial Sequence
  Synthetic
tcaatgaggttgttttgcag

SEQ ID NO: 38775 - DNA, 20 bp, Artificial Sequence
  Synthetic
aaaacaacctcattgagtac

SEQ ID NO: 38776 - DNA, 20 bp, Artificial Sequence
  Synthetic
ccatgcaccagtactcaatg

SEQ ID NO: 38777 - DNA, 20 bp, Artificial Sequence
  Synthetic
cctcattgagtactggtgca

SEQ ID NO: 38778 - DNA, 20 bp, Artificial Sequence
  Synthetic
cattgagtactggtgcatgg

SEQ ID NO: 38779 - DNA, 20 bp, Artificial Sequence
  Synthetic
tttgtgcgcccagacttcct

SEQ ID NO: 38780 - DNA, 20 bp, Artificial Sequence
  Synthetic
gcccagacttccttggcacc

SEQ ID NO: 38781 - DNA, 20 bp, Artificial Sequence
  Synthetic
gccgggtgccaaggaagtct

SEQ ID NO: 38782 - DNA, 20 bp, Artificial Sequence
  Synthetic
tgccgggtgccaaggaagtc

SEQ ID NO: 38783 - DNA, 20 bp, Artificial Sequence
  Synthetic
agacttccttggcacccggc

SEQ ID NO: 38784 - DNA, 20 bp, Artificial Sequence
  Synthetic
tgaactcctgccgggtgcca

SEQ ID NO: 38785 - DNA, 20 bp, Artificial Sequence
  Synthetic
catgttgctgaactcctgcc

SEQ ID NO: 38786 - DNA, 20 bp, Artificial Sequence
  Synthetic
acatgttgctgaactcctgc

SEQ ID NO: 38787 - DNA, 20 bp, Artificial Sequence
  Synthetic
tttgaacgccctatcctgaa

SEQ ID NO: 38788 - DNA, 20 bp, Artificial Sequence
  Synthetic
ttgaacgccctatcctgaat

SEQ ID NO: 38789 - DNA, 20 bp, Artificial Sequence
  Synthetic
tacattgcccattcaggata

SEQ ID NO: 38790 - DNA, 20 bp, Artificial Sequence
  Synthetic
atacattgcccattcaggat

SEQ ID NO: 38791 - DNA, 20 bp, Artificial Sequence
  Synthetic
tgtcaatacattgcccattc

SEQ ID NO: 38792 - DNA, 20 bp, Artificial Sequence
  Synthetic
atgtattgacagcacacctc

SEQ ID NO: 38793 - DNA, 20 bp, Artificial Sequence
  Synthetic
cgcatgaggcggacgtcctg

SEQ ID NO: 38794 - DNA, 20 bp, Artificial Sequence
  Synthetic
ctcaggacgtccgcctcatg

SEQ ID NO: 38795 - DNA, 20 bp, Artificial Sequence
  Synthetic
acgtccgcctcatgcggtac

SEQ ID NO: 38796 - DNA, 20 bp, Artificial Sequence
  Synthetic
ggctccggtaccgcatgagg

SEQ ID NO: 38797 - DNA, 20 bp, Artificial Sequence
  Synthetic
catggctccggtaccgcatg

SEQ ID NO: 38798 - DNA, 20 bp, Artificial Sequence
  Synthetic
gactgtgcaggacatggctc

SEQ ID NO: 38799 - DNA, 20 bp, Artificial Sequence
  Synthetic
ccagaagactgtgcaggaca

SEQ ID NO: 38800 - DNA, 20 bp, Artificial Sequence
  Synthetic
ccatgtcctgcacagtcttc

SEQ ID NO: 38801 - DNA, 20 bp, Artificial Sequence
  Synthetic
tgtcctgcacagtcttctgg

SEQ ID NO: 38802 - DNA, 20 bp, Artificial Sequence
  Synthetic
gtcctgcacagtcttctgga

SEQ ID NO: 38803 - DNA, 20 bp, Artificial Sequence
  Synthetic
agccctccagaagactgtgc

SEQ ID NO: 38804 - DNA, 20 bp, Artificial Sequence
  Synthetic
ttctggagggctttgtgcag

SEQ ID NO: 38805 - DNA, 20 bp, Artificial Sequence
  Synthetic
gatgaatcttcagcacagtg

SEQ ID NO: 38806 - DNA, 20 bp, Artificial Sequence
  Synthetic
gaagattcatctccctgcca

SEQ ID NO: 38807 - DNA, 20 bp, Artificial Sequence
  Synthetic
tcacattttcttccttggca

SEQ ID NO: 38808 - DNA, 20 bp, Artificial Sequence
  Synthetic
atcacattttcttccttggc

SEQ ID NO: 38809 - DNA, 20 bp, Artificial Sequence
  Synthetic
aaggatcacattttcttcct

SEQ ID NO: 38810 - DNA, 20 bp, Artificial Sequence
  Synthetic
aagaaaatgtgatccttgtg

SEQ ID NO: 38811 - DNA, 20 bp, Artificial Sequence
  Synthetic
ggatcttggagagccgcaca

SEQ ID NO: 38812 - DNA, 20 bp, Artificial Sequence
  Synthetic
atacaaatctcgctggatct

SEQ ID NO: 38813 - DNA, 20 bp, Artificial Sequence
  Synthetic
actgtgtatacaaatctcgc

SEQ ID NO: 38814 - DNA, 20 bp, Artificial Sequence
  Synthetic
agatttgtatacacagttca

SEQ ID NO: 38815 - DNA, 20 bp, Artificial Sequence
  Synthetic
gatgcgaagaccatctttac

SEQ ID NO: 38816 - DNA, 20 bp, Artificial Sequence
  Synthetic
atgcgaagaccatctttaca

SEQ ID NO: 38817 - DNA, 20 bp, Artificial Sequence
  Synthetic
gaccatctttacagggcata

SEQ ID NO: 38818 - DNA, 20 bp, Artificial Sequence
  Synthetic
tgccgtatgccctgtaaaga

SEQ ID NO: 38819 - DNA, 20 bp, Artificial Sequence
  Synthetic
cagtagtagaagatgtttcc

SEQ ID NO: 38820 - DNA, 20 bp, Artificial Sequence
  Synthetic
agactcatggagtagatgcc

SEQ ID NO: 38821 - DNA, 20 bp, Artificial Sequence
  Synthetic
ctactccatgagtctctgtt

SEQ ID NO: 38822 - DNA, 20 bp, Artificial Sequence
  Synthetic
tactccatgagtctctgttt

SEQ ID NO: 38823 - DNA, 20 bp, Artificial Sequence
  Synthetic
ctgacccaaacagagactca

SEQ ID NO: 38824 - DNA, 20 bp, Artificial Sequence
  Synthetic
gcattcctttgagtcacata

SEQ ID NO: 38825 - DNA, 20 bp, Artificial Sequence
  Synthetic
ttcatccttatgtgactcaa

SEQ ID NO: 38826 - DNA, 20 bp, Artificial Sequence
  Synthetic
acataaggatgaaatattcc

SEQ ID NO: 38827 - DNA, 20 bp, Artificial Sequence
  Synthetic
attcctatgtgtaggttcag

SEQ ID NO: 38828 - DNA, 20 bp, Artificial Sequence
  Synthetic
gctaaaatagtctcattgtg

SEQ ID NO: 38829 - DNA, 20 bp, Artificial Sequence
  Synthetic
gagactattttagcttccag

SEQ ID NO: 38830 - DNA, 20 bp, Artificial Sequence
  Synthetic
cagtctgcgatcagtaccac

SEQ ID NO: 38831 - DNA, 20 bp, Artificial Sequence
  Synthetic
ctgatcgcagactgaatgtc

SEQ ID NO: 38832 - DNA, 20 bp, Artificial Sequence
  Synthetic
tgatcgcagactgaatgtct

SEQ ID NO: 38833 - DNA, 20 bp, Artificial Sequence
  Synthetic
agacgggccaccagagttgt

SEQ ID NO: 38834 - DNA, 20 bp, Artificial Sequence
  Synthetic
tccctctttcagtttattca

SEQ ID NO: 38835 - DNA, 20 bp, Artificial Sequence
  Synthetic
ctctttcagtttattcatgg

SEQ ID NO: 38836 - DNA, 20 bp, Artificial Sequence
  Synthetic
ccaggagaaatcagatatct

SEQ ID NO: 38837 - DNA, 20 bp, Artificial Sequence
  Synthetic
ccaagatatctgatttctcc

SEQ ID NO: 38838 - DNA, 20 bp, Artificial Sequence
  Synthetic
ccaaggttcattgggattcc

SEQ ID NO: 38839 - DNA, 20 bp, Artificial Sequence
  Synthetic
cctggaatcccaatgaacct

SEQ ID NO: 38840 - DNA, 20 bp, Artificial Sequence
  Synthetic
ctggaatcccaatgaacctt

SEQ ID NO: 38841 - DNA, 20 bp, Artificial Sequence
  Synthetic
caaatcacccaaggttcatt

SEQ ID NO: 38842 - DNA, 20 bp, Artificial Sequence
  Synthetic
acaaatcacccaaggttcat

SEQ ID NO: 38843 - DNA, 20 bp, Artificial Sequence
  Synthetic
gatacagaacaaatcaccca

SEQ ID NO: 38844 - DNA, 20 bp, Artificial Sequence
  Synthetic
aagacaatatcatgcaagtg

SEQ ID NO: 38845 - DNA, 20 bp, Artificial Sequence
  Synthetic
atcaactgagtggcttggtt

SEQ ID NO: 38846 - DNA, 20 bp, Artificial Sequence
  Synthetic
tgagcatcaactgagtggct

SEQ ID NO: 38847 - DNA, 20 bp, Artificial Sequence
  Synthetic
cagtgtgagcatcaactgag

SEQ ID NO: 38848 - DNA, 20 bp, Artificial Sequence
  Synthetic
cactataaggattgaaagaa

SEQ ID NO: 38849 - DNA, 20 bp, Artificial Sequence
  Synthetic
gcaagaatgaactcactata

SEQ ID NO: 38850 - DNA, 20 bp, Artificial Sequence
  Synthetic
agtgagttcattcttgccac

SEQ ID NO: 38851 - DNA, 20 bp, Artificial Sequence
  Synthetic
tgccacaggatcagctgaca

SEQ ID NO: 38852 - DNA, 20 bp, Artificial Sequence
  Synthetic
gaccttgtcagctgatcctg

SEQ ID NO: 38853 - DNA, 20 bp, Artificial Sequence
  Synthetic
gtacatagactgttgccttg

SEQ ID NO: 38854 - DNA, 20 bp, Artificial Sequence
  Synthetic
tacatagactgttgccttgt

SEQ ID NO: 38855 - DNA, 20 bp, Artificial Sequence
  Synthetic
cagatttctcagatcccaca

SEQ ID NO: 38856 - DNA, 20 bp, Artificial Sequence
  Synthetic
aacccagacttgcgtctccg

SEQ ID NO: 38857 - DNA, 20 bp, Artificial Sequence
  Synthetic
gcgtctccgtggacatcaga

SEQ ID NO: 38858 - DNA, 20 bp, Artificial Sequence
  Synthetic
ctccgtggacatcagaagga

SEQ ID NO: 38859 - DNA, 20 bp, Artificial Sequence
  Synthetic
agccttccttctgatgtcca

SEQ ID NO: 38860 - DNA, 20 bp, Artificial Sequence
  Synthetic
ggacatcagaaggaaggcta

SEQ ID NO: 38861 - DNA, 20 bp, Artificial Sequence
  Synthetic
gacatcagaaggaaggctat

SEQ ID NO: 38862 - DNA, 20 bp, Artificial Sequence
  Synthetic
aggaaggctatgggctttct

SEQ ID NO: 38863 - DNA, 20 bp, Artificial Sequence
  Synthetic
tcttggaacccaaatctcag

SEQ ID NO: 38864 - DNA, 20 bp, Artificial Sequence
  Synthetic
cttggaacccaaatctcagt

SEQ ID NO: 38865 - DNA, 20 bp, Artificial Sequence
  Synthetic
gtaagtgcccactgagattt

SEQ ID NO: 38866 - DNA, 20 bp, Artificial Sequence
  Synthetic
agtaagtgcccactgagatt

SEQ ID NO: 38867 - DNA, 20 bp, Artificial Sequence
  Synthetic
catttaagaccatctgcctg

SEQ ID NO: 38868 - DNA, 20 bp, Artificial Sequence
  Synthetic
atttaagaccatctgcctgt

SEQ ID NO: 38869 - DNA, 20 bp, Artificial Sequence
  Synthetic
actgatgtcccacaggcaga

SEQ ID NO: 38870 - DNA, 20 bp, Artificial Sequence
  Synthetic
gaacggcactgatgtcccac

SEQ ID NO: 38871 - DNA, 20 bp, Artificial Sequence
  Synthetic
tccatccagtgtgttcttta

SEQ ID NO: 38872 - DNA, 20 bp, Artificial Sequence
  Synthetic
accataaagaacacactgga

SEQ ID NO: 38873 - DNA, 20 bp, Artificial Sequence
  Synthetic
tcttaccataaagaacacac

SEQ ID NO: 38874 - DNA, 20 bp, Artificial Sequence
  Synthetic
ttcctcagctggagccgaga

SEQ ID NO: 38875 - DNA, 20 bp, Artificial Sequence
  Synthetic
tcacgagtttatgaccatct

SEQ ID NO: 38876 - DNA, 20 bp, Artificial Sequence
  Synthetic
ctgtgacactatgttatcag

SEQ ID NO: 38877 - DNA, 20 bp, Artificial Sequence
  Synthetic
ctgataacatagtgtcacag

SEQ ID NO: 38878 - DNA, 20 bp, Artificial Sequence
  Synthetic
tgataacatagtgtcacagt

SEQ ID NO: 38879 - DNA, 20 bp, Artificial Sequence
  Synthetic
ctttgacttgcacctttaac

SEQ ID NO: 38880 - DNA, 20 bp, Artificial Sequence
  Synthetic
tgacttgcacctttaacagg

SEQ ID NO: 38881 - DNA, 20 bp, Artificial Sequence
  Synthetic
gacttgcacctttaacaggt

SEQ ID NO: 38882 - DNA, 20 bp, Artificial Sequence
  Synthetic
acttgcacctttaacaggtg

SEQ ID NO: 38883 - DNA, 20 bp, Artificial Sequence
  Synthetic
cagtgtgccccacctgttaa

SEQ ID NO: 38884 - DNA, 20 bp, Artificial Sequence
  Synthetic
tggggcacactgcttgcagt

SEQ ID NO: 38885 - DNA, 20 bp, Artificial Sequence
  Synthetic
cttgcagttggctgtaatga

SEQ ID NO: 38886 - DNA, 20 bp, Artificial Sequence
  Synthetic
atgatggccgaattgtcatc

SEQ ID NO: 38887 - DNA, 20 bp, Artificial Sequence
  Synthetic
tgatggccgaattgtcatct

SEQ ID NO: 38888 - DNA, 20 bp, Artificial Sequence
  Synthetic
agaaatcccagatgacaatt

SEQ ID NO: 38889 - DNA, 20 bp, Artificial Sequence
  Synthetic
gatgctaaagccatctttac

SEQ ID NO: 38890 - DNA, 20 bp, Artificial Sequence
  Synthetic
agctgagtggccagtaaaga

SEQ ID NO: 38891 - DNA, 20 bp, Artificial Sequence
  Synthetic
tggccactcagctgttgtag

SEQ ID NO: 38892 - DNA, 20 bp, Artificial Sequence
  Synthetic
catcctctacaacagctgag

SEQ ID NO: 38893 - DNA, 20 bp, Artificial Sequence
  Synthetic
ctcagctgttgtagaggatg

SEQ ID NO: 38894 - DNA, 20 bp, Artificial Sequence
  Synthetic
ctgttgtagaggatgtggcc

SEQ ID NO: 38895 - DNA, 20 bp, Artificial Sequence
  Synthetic
tgactcgtgcagcaggtgcc

SEQ ID NO: 38896 - DNA, 20 bp, Artificial Sequence
  Synthetic
caaacaatgactcgtgcagc

SEQ ID NO: 38897 - DNA, 20 bp, Artificial Sequence
  Synthetic
ctgctgcacgagtcattgtt

SEQ ID NO: 38898 - DNA, 20 bp, Artificial Sequence
  Synthetic
aatcctgatctcagattaag

SEQ ID NO: 38899 - DNA, 20 bp, Artificial Sequence
  Synthetic
cagattaagaggtcaccaga

SEQ ID NO: 38900 - DNA, 20 bp, Artificial Sequence
  Synthetic
ttaagaggtcaccagaagga

SEQ ID NO: 38901 - DNA, 20 bp, Artificial Sequence
  Synthetic
ggtcaccagaaggaaggcta

SEQ ID NO: 38902 - DNA, 20 bp, Artificial Sequence
  Synthetic
agagaccatagccttccttc

SEQ ID NO: 38903 - DNA, 20 bp, Artificial Sequence
  Synthetic
aggaaggctatggtctctcc

SEQ ID NO: 38904 - DNA, 20 bp, Artificial Sequence
  Synthetic
tcctggaattcaaatttgag

SEQ ID NO: 38905 - DNA, 20 bp, Artificial Sequence
  Synthetic
tccactcaaatttgaattcc

SEQ ID NO: 38906 - DNA, 20 bp, Artificial Sequence
  Synthetic
catggtcatcagatgcactt

SEQ ID NO: 38907 - DNA, 20 bp, Artificial Sequence
  Synthetic
tctcttagactgtttgtctg

SEQ ID NO: 38908 - DNA, 20 bp, Artificial Sequence
  Synthetic
ctcttagactgtttgtctgt

SEQ ID NO: 38909 - DNA, 20 bp, Artificial Sequence
  Synthetic
agatgggcctccagaactcc

SEQ ID NO: 38910 - DNA, 20 bp, Artificial Sequence
  Synthetic
ttcttgtaacagtttattca

SEQ ID NO: 38911 - DNA, 20 bp, Artificial Sequence
  Synthetic
ttgtaacagtttattcatgg

SEQ ID NO: 38912 - DNA, 20 bp, Artificial Sequence
  Synthetic
ctaagatttcagattttagc

SEQ ID NO: 38913 - DNA, 20 bp, Artificial Sequence
  Synthetic
gctggaaccccaatgagcct

SEQ ID NO: 38914 - DNA, 20 bp, Artificial Sequence
  Synthetic
ctggaaccccaatgagcctt

SEQ ID NO: 38915 - DNA, 20 bp, Artificial Sequence
  Synthetic
aaatgacccaaggctcattg

SEQ ID NO: 38916 - DNA, 20 bp, Artificial Sequence
  Synthetic
caaatgacccaaggctcatt

SEQ ID NO: 38917 - DNA, 20 bp, Artificial Sequence
  Synthetic
gcaaatgacccaaggctcat

SEQ ID NO: 38918 - DNA, 20 bp, Artificial Sequence
  Synthetic
gacactgagcaaatgaccca

SEQ ID NO: 38919 - DNA, 20 bp, Artificial Sequence
  Synthetic
ggtcatttgctcagtgtctg

SEQ ID NO: 38920 - DNA, 20 bp, Artificial Sequence
  Synthetic
aggataacatcatgcagata

SEQ ID NO: 38921 - DNA, 20 bp, Artificial Sequence
  Synthetic
ctttatgagattcgaaggta

SEQ ID NO: 38922 - DNA, 20 bp, Artificial Sequence
  Synthetic
ttcatctttatgagattcga

SEQ ID NO: 38923 - DNA, 20 bp, Artificial Sequence
  Synthetic
tcataaagatgaaattttcc

SEQ ID NO: 38924 - DNA, 20 bp, Artificial Sequence
  Synthetic
ttatctattactaggtccac

SEQ ID NO: 38925 - DNA, 20 bp, Artificial Sequence
  Synthetic
tttcattatgtggagaccag

SEQ ID NO: 38926 - DNA, 20 bp, Artificial Sequence
  Synthetic
tccacataatgaaactattc

SEQ ID NO: 38927 - DNA, 20 bp, Artificial Sequence
  Synthetic
gccagaatagtttcattatg

SEQ ID NO: 38928 - DNA, 20 bp, Artificial Sequence
  Synthetic
gaaactattctggcttcaag

SEQ ID NO: 38929 - DNA, 20 bp, Artificial Sequence
  Synthetic
ctgaccgccgcctgaatgtg

SEQ ID NO: 38930 - DNA, 20 bp, Artificial Sequence
  Synthetic
tgaccgccgcctgaatgtgt

SEQ ID NO: 38931 - DNA, 20 bp, Artificial Sequence
  Synthetic
aatcccacacattcaggcgg

SEQ ID NO: 38932 - DNA, 20 bp, Artificial Sequence
  Synthetic
ttaaatcccacacattcagg

SEQ ID NO: 38933 - DNA, 20 bp, Artificial Sequence
  Synthetic
accttaaatcccacacattc

SEQ ID NO: 38934 - DNA, 20 bp, Artificial Sequence
  Synthetic
cacctccaagccgagtcact

SEQ ID NO: 38935 - DNA, 20 bp, Artificial Sequence
  Synthetic
ctccaagccgagtcacttgg

SEQ ID NO: 38936 - DNA, 20 bp, Artificial Sequence
  Synthetic
atccaccaagtgactcggct

SEQ ID NO: 38937 - DNA, 20 bp, Artificial Sequence
  Synthetic
tgcgcatccaccaagtgact

SEQ ID NO: 38938 - DNA, 20 bp, Artificial Sequence
  Synthetic
gaatgagaggcagttgactt

SEQ ID NO: 38939 - DNA, 20 bp, Artificial Sequence
  Synthetic
cgctgtagggattgaatgag

SEQ ID NO: 38940 - DNA, 20 bp, Artificial Sequence
  Synthetic
gctagaataaattcgctgta

SEQ ID NO: 38941 - DNA, 20 bp, Artificial Sequence
  Synthetic
ggctagaataaattcgctgt

SEQ ID NO: 38942 - DNA, 20 bp, Artificial Sequence
  Synthetic
agcgaatttattctagccac

SEQ ID NO: 38943 - DNA, 20 bp, Artificial Sequence
  Synthetic
tattctagccaccggctctg

SEQ ID NO: 38944 - DNA, 20 bp, Artificial Sequence
  Synthetic
agccaccggctctgcggata

SEQ ID NO: 38945 - DNA, 20 bp, Artificial Sequence
  Synthetic
aaccttatccgcagagccgg

SEQ ID NO: 38946 - DNA, 20 bp, Artificial Sequence
  Synthetic
cgaaaccttatccgcagagc

SEQ ID NO: 38947 - DNA, 20 bp, Artificial Sequence
  Synthetic
ttctttagaccgtagcttta

SEQ ID NO: 38948 - DNA, 20 bp, Artificial Sequence
  Synthetic
tctttagaccgtagctttat

SEQ ID NO: 38949 - DNA, 20 bp, Artificial Sequence
  Synthetic
acgcagatcccataaagcta

SEQ ID NO: 38950 - DNA, 20 bp, Artificial Sequence
  Synthetic
ccaaatggtatctggaagag

SEQ ID NO: 38951 - DNA, 20 bp, Artificial Sequence
  Synthetic
cccctcttccagataccatt

SEQ ID NO: 38952 - DNA, 20 bp, Artificial Sequence
  Synthetic
gccaaatggtatctggaaga

SEQ ID NO: 38953 - DNA, 20 bp, Artificial Sequence
  Synthetic
agccaaatggtatctggaag

SEQ ID NO: 38954 - DNA, 20 bp, Artificial Sequence
  Synthetic
tccagataccatttggcttt

SEQ ID NO: 38955 - DNA, 20 bp, Artificial Sequence
  Synthetic
gccgaaagccaaatggtatc

SEQ ID NO: 38956 - DNA, 20 bp, Artificial Sequence
  Synthetic
ctgcacagccgaaagccaaa

SEQ ID NO: 38957 - DNA, 20 bp, Artificial Sequence
  Synthetic
catttggctttcggctgtgc

SEQ ID NO: 38958 - DNA, 20 bp, Artificial Sequence
  Synthetic
tgttacgaagatcatagtag

SEQ ID NO: 38959 - DNA, 20 bp, Artificial Sequence
  Synthetic
attcacaggacagaggtcaa

SEQ ID NO: 38960 - DNA, 20 bp, Artificial Sequence
  Synthetic
acagaggtcaaaggtctatc

SEQ ID NO: 38961 - DNA, 20 bp, Artificial Sequence
  Synthetic
gcttccaggagcatgagaag

SEQ ID NO: 38962 - DNA, 20 bp, Artificial Sequence
  Synthetic
aacacctcttctcatgctcc

SEQ ID NO: 38963 - DNA, 20 bp, Artificial Sequence
  Synthetic
aggagcatgagaagaggtgt

SEQ ID NO: 38964 - DNA, 20 bp, Artificial Sequence
  Synthetic
gagtgttgactttaatttga

SEQ ID NO: 38965 - DNA, 20 bp, Artificial Sequence
  Synthetic
tttgatggatcctaaactct

SEQ ID NO: 38966 - DNA, 20 bp, Artificial Sequence
  Synthetic
gatcctaaactcttggcttc

SEQ ID NO: 38967 - DNA, 20 bp, Artificial Sequence
  Synthetic
gaacctgaagccaagagttt

SEQ ID NO: 38968 - DNA, 20 bp, Artificial Sequence
  Synthetic
tcaggttctgatgatgcaaa

SEQ ID NO: 38969 - DNA, 20 bp, Artificial Sequence
  Synthetic
ctttgcccttagtgaagctg

SEQ ID NO: 38970 - DNA, 20 bp, Artificial Sequence
  Synthetic
taacactaaacagccaatca

SEQ ID NO: 38971 - DNA, 20 bp, Artificial Sequence
  Synthetic
cagccaatcatggtattcaa

SEQ ID NO: 38972 - DNA, 20 bp, Artificial Sequence
  Synthetic
tgtcctttgaataccatgat

SEQ ID NO: 38973 - DNA, 20 bp, Artificial Sequence
  Synthetic
ttgcataagagactgcttta

SEQ ID NO: 38974 - DNA, 20 bp, Artificial Sequence
  Synthetic
tcttatgcaaagtttgtgag

SEQ ID NO: 38975 - DNA, 20 bp, Artificial Sequence
  Synthetic
tgcaaagtttgtgagtggtg

SEQ ID NO: 38976 - DNA, 20 bp, Artificial Sequence
  Synthetic
cagacagtcagctaaaactg

SEQ ID NO: 38977 - DNA, 20 bp, Artificial Sequence
  Synthetic
cagctaaaactgtggaatgt

SEQ ID NO: 38978 - DNA, 20 bp, Artificial Sequence
  Synthetic
tgacctgcaattcgaaaatc

SEQ ID NO: 38979 - DNA, 20 bp, Artificial Sequence
  Synthetic
tttctttcagctgtatcagt

SEQ ID NO: 38980 - DNA, 20 bp, Artificial Sequence
  Synthetic
tgctagctaacaggttctta

SEQ ID NO: 38981 - DNA, 20 bp, Artificial Sequence
  Synthetic
cataatcactgctagctaac

SEQ ID NO: 38982 - DNA, 20 bp, Artificial Sequence
  Synthetic
ttagctagcagtgattatga

SEQ ID NO: 38983 - DNA, 20 bp, Artificial Sequence
  Synthetic
atgaaggcactgttatttta

SEQ ID NO: 38984 - DNA, 20 bp, Artificial Sequence
  Synthetic
tgaaggcactgttattttat

SEQ ID NO: 38985 - DNA, 20 bp, Artificial Sequence
  Synthetic
ggcactgttattttatggga

SEQ ID NO: 38986 - DNA, 20 bp, Artificial Sequence
  Synthetic
gatgaaccatgcaaaaaatg

SEQ ID NO: 38987 - DNA, 20 bp, Artificial Sequence
  Synthetic
ggaaggccacattttttgca

SEQ ID NO: 38988 - DNA, 20 bp, Artificial Sequence
  Synthetic
ctagctcaggatggtttgga

SEQ ID NO: 38989 - DNA, 20 bp, Artificial Sequence
  Synthetic
catactagctcaggatggtt

SEQ ID NO: 38990 - DNA, 20 bp, Artificial Sequence
  Synthetic
aggtacatactagctcagga

SEQ ID NO: 38991 - DNA, 20 bp, Artificial Sequence
  Synthetic
catcaggtacatactagctc

SEQ ID NO: 38992 - DNA, 20 bp, Artificial Sequence
  Synthetic
ctgtgtgactcttgcgatag

SEQ ID NO: 38993 - DNA, 20 bp, Artificial Sequence
  Synthetic
gagggcgaaggcaggcagta

SEQ ID NO: 38994 - DNA, 20 bp, Artificial Sequence
  Synthetic
catcagaggagggcgaaggc

SEQ ID NO: 38995 - DNA, 20 bp, Artificial Sequence
  Synthetic
tgatcatcagaggagggcga

SEQ ID NO: 38996 - DNA, 20 bp, Artificial Sequence
  Synthetic
ctgggatgatcatcagagga

SEQ ID NO: 38997 - DNA, 20 bp, Artificial Sequence
  Synthetic
tctgggatgatcatcagagg

SEQ ID NO: 38998 - DNA, 20 bp, Artificial Sequence
  Synthetic
ccatctgggatgatcatcag

SEQ ID NO: 38999 - DNA, 20 bp, Artificial Sequence
  Synthetic
cctctgatgatcatcccaga

SEQ ID NO: 39000 - DNA, 20 bp, Artificial Sequence
  Synthetic
tgatcatcccagatggagaa

SEQ ID NO: 39001 - DNA, 20 bp, Artificial Sequence
  Synthetic
ggcagaaccattctccatct

SEQ ID NO: 39002 - DNA, 20 bp, Artificial Sequence
  Synthetic
gggcagaaccattctccatc

SEQ ID NO: 39003 - DNA, 20 bp, Artificial Sequence
  Synthetic
gtcttacatgttggcaaggt

SEQ ID NO: 39004 - DNA, 20 bp, Artificial Sequence
  Synthetic
ggtcttacatgttggcaagg

SEQ ID NO: 39005 - DNA, 20 bp, Artificial Sequence
  Synthetic
cggggtcttacatgttggca

SEQ ID NO: 39006 - DNA, 20 bp, Artificial Sequence
  Synthetic
gtgggcggggtcttacatgt

SEQ ID NO: 39007 - DNA, 20 bp, Artificial Sequence
  Synthetic
taagtgtatttacttgtaat

SEQ ID NO: 39008 - DNA, 20 bp, Artificial Sequence
  Synthetic
aattacaagtaaatacactt

SEQ ID NO: 39009 - DNA, 20 bp, Artificial Sequence
  Synthetic
ttcaagctaccaaccagacc

SEQ ID NO: 39010 - DNA, 20 bp, Artificial Sequence
  Synthetic
ttattaagtcctggtctggt

SEQ ID NO: 39011 - DNA, 20 bp, Artificial Sequence
  Synthetic
tgctttattaagtcctggtc

SEQ ID NO: 39012 - DNA, 20 bp, Artificial Sequence
  Synthetic
agttgtgctttattaagtcc

SEQ ID NO: 39013 - DNA, 20 bp, Artificial Sequence
  Synthetic
taataaagcacaacttgttg

SEQ ID NO: 39014 - DNA, 20 bp, Artificial Sequence
  Synthetic
ttcttttctttgtagatagt

SEQ ID NO: 39015 - DNA, 20 bp, Artificial Sequence
  Synthetic
agatagttggttgccacttt

SEQ ID NO: 39016 - DNA, 20 bp, Artificial Sequence
  Synthetic
tcactggaatagacctaaag

SEQ ID NO: 39017 - DNA, 20 bp, Artificial Sequence
  Synthetic
aaggtgtctttttcattcac

SEQ ID NO: 39018 - DNA, 20 bp, Artificial Sequence
  Synthetic
tgagtagatgaaatatgtta

SEQ ID NO: 39019 - DNA, 20 bp, Artificial Sequence
  Synthetic
ggttgatctgttccagctgc

SEQ ID NO: 39020 - DNA, 20 bp, Artificial Sequence
  Synthetic
gtagggtgttcacctgcagc

SEQ ID NO: 39021 - DNA, 20 bp, Artificial Sequence
  Synthetic
gtgtcgtttataacgtcgta

SEQ ID NO: 39022 - DNA, 20 bp, Artificial Sequence
  Synthetic
agtgtcgtttataacgtcgt

SEQ ID NO: 39023 - DNA, 20 bp, Artificial Sequence
  Synthetic
tacaagttgcagaccagacc

SEQ ID NO: 39024 - DNA, 20 bp, Artificial Sequence
  Synthetic
gaccagaccaggcttcaata

SEQ ID NO: 39025 - DNA, 20 bp, Artificial Sequence
  Synthetic
ggccttattgaagcctggtc

SEQ ID NO: 39026 - DNA, 20 bp, Artificial Sequence
  Synthetic
aactgggccttattgaagcc

SEQ ID NO: 39027 - DNA, 20 bp, Artificial Sequence
  Synthetic
aaggcccagttagcagaagt

SEQ ID NO: 39028 - DNA, 20 bp, Artificial Sequence
  Synthetic
tctacctacttctgctaact

SEQ ID NO: 39029 - DNA, 20 bp, Artificial Sequence
  Synthetic
gtctacctacttctgctaac

SEQ ID NO: 39030 - DNA, 20 bp, Artificial Sequence
  Synthetic
agactgtgagtcgacacttc

SEQ ID NO: 39031 - DNA, 20 bp, Artificial Sequence
  Synthetic
agggtctctttttcattcac

SEQ ID NO: 39032 - DNA, 20 bp, Artificial Sequence
  Synthetic
catgtagatgaagtaggcaa

SEQ ID NO: 39033 - DNA, 20 bp, Artificial Sequence
  Synthetic
ccatgtagatgaagtaggca

SEQ ID NO: 39034 - DNA, 20 bp, Artificial Sequence
  Synthetic
ccttgcctacttcatctaca

SEQ ID NO: 39035 - DNA, 20 bp, Artificial Sequence
  Synthetic
cttcaccatgtagatgaagt

SEQ ID NO: 39036 - DNA, 20 bp, Artificial Sequence
  Synthetic
aagtacaaaatgaaatagac

SEQ ID NO: 39037 - DNA, 20 bp, Artificial Sequence
  Synthetic
acttaatgaacaagccagtg

SEQ ID NO: 39038 - DNA, 20 bp, Artificial Sequence
  Synthetic
tactttcaaaatctcctcac

SEQ ID NO: 39039 - DNA, 20 bp, Artificial Sequence
  Synthetic
tcttctgaaaaaatggttgg

SEQ ID NO: 39040 - DNA, 20 bp, Artificial Sequence
  Synthetic
gccaaccattttttcagaag

SEQ ID NO: 39041 - DNA, 20 bp, Artificial Sequence
  Synthetic
acctcttctgaaaaaatggt

SEQ ID NO: 39042 - DNA, 20 bp, Artificial Sequence
  Synthetic
tctgacctcttctgaaaaaa

SEQ ID NO: 39043 - DNA, 20 bp, Artificial Sequence
  Synthetic
tcgccaaaatcccaaatttt

SEQ ID NO: 39044 - DNA, 20 bp, Artificial Sequence
  Synthetic
cgccaaaatcccaaattttt

SEQ ID NO: 39045 - DNA, 20 bp, Artificial Sequence
  Synthetic
tacccaaaaatttgggattt

SEQ ID NO: 39046 - DNA, 20 bp, Artificial Sequence
  Synthetic
atgttgttacccaaaaattt

SEQ ID NO: 39047 - DNA, 20 bp, Artificial Sequence
  Synthetic
aatgttgttacccaaaaatt

SEQ ID NO: 39048 - DNA, 20 bp, Artificial Sequence
  Synthetic
acatttgtcaaccatccaca

SEQ ID NO: 39049 - DNA, 20 bp, Artificial Sequence
  Synthetic
tccaaaacataccttgtgga

SEQ ID NO: 39050 - DNA, 20 bp, Artificial Sequence
  Synthetic
cctgtccaaaacataccttg

SEQ ID NO: 39051 - DNA, 20 bp, Artificial Sequence
  Synthetic
ggcctagtgtctgcactgct

SEQ ID NO: 39052 - DNA, 20 bp, Artificial Sequence
  Synthetic
gcctagtgtctgcactgctt

SEQ ID NO: 39053 - DNA, 20 bp, Artificial Sequence
  Synthetic
cctagtgtctgcactgcttg

SEQ ID NO: 39054 - DNA, 20 bp, Artificial Sequence
  Synthetic
agtgtctgcactgcttgggg

SEQ ID NO: 39055 - DNA, 20 bp, Artificial Sequence
  Synthetic
gcttggggaggaagatgaag

SEQ ID NO: 39056 - DNA, 20 bp, Artificial Sequence
  Synthetic
aaattctgtcacttcaactc

SEQ ID NO: 39057 - DNA, 20 bp, Artificial Sequence
  Synthetic
gaatttgaagatattaaatc

SEQ ID NO: 39058 - DNA, 20 bp, Artificial Sequence
  Synthetic
agaactttattttcaaagta

SEQ ID NO: 39059 - DNA, 20 bp, Artificial Sequence
  Synthetic
ctcattcagatgaaattctt

SEQ ID NO: 39060 - DNA, 20 bp, Artificial Sequence
  Synthetic
gaatttcatctgaatgagag

SEQ ID NO: 39061 - DNA, 20 bp, Artificial Sequence
  Synthetic
atttcggtggacttcgaaga

SEQ ID NO: 39062 - DNA, 20 bp, Artificial Sequence
  Synthetic
cgaagtccaccgaaatcaaa

SEQ ID NO: 39063 - DNA, 20 bp, Artificial Sequence
  Synthetic
agatttccatttgatttcgg

SEQ ID NO: 39064 - DNA, 20 bp, Artificial Sequence
  Synthetic
accgaaatcaaatggaaatc

SEQ ID NO: 39065 - DNA, 20 bp, Artificial Sequence
  Synthetic
tccagatttccatttgattt

SEQ ID NO: 39066 - DNA, 20 bp, Artificial Sequence
  Synthetic
aatcaaatggaaatctggaa

SEQ ID NO: 39067 - DNA, 20 bp, Artificial Sequence
  Synthetic
aaacgcagaataaagccagc

SEQ ID NO: 39068 - DNA, 20 bp, Artificial Sequence
  Synthetic
agaataaagccagcaggaag

SEQ ID NO: 39069 - DNA, 20 bp, Artificial Sequence
  Synthetic
ctcatgctgcctcttcctgc

SEQ ID NO: 39070 - DNA, 20 bp, Artificial Sequence
  Synthetic
cagcaggaagaggcagcatg

SEQ ID NO: 39071 - DNA, 20 bp, Artificial Sequence
  Synthetic
aaccagagagcttctttacc

SEQ ID NO: 39072 - DNA, 20 bp, Artificial Sequence
  Synthetic
aaccaggtaaagaagctctc

SEQ ID NO: 39073 - DNA, 20 bp, Artificial Sequence
  Synthetic
atcagaatggtcagtaaacc

SEQ ID NO: 39074 - DNA, 20 bp, Artificial Sequence
  Synthetic
tttactgaccattctgatgc

SEQ ID NO: 39075 - DNA, 20 bp, Artificial Sequence
  Synthetic
catcagcacctgcatcagaa

SEQ ID NO: 39076 - DNA, 20 bp, Artificial Sequence
  Synthetic
gatgcaggtgctgatgagtt

SEQ ID NO: 39077 - DNA, 20 bp, Artificial Sequence
  Synthetic
aggtgctgatgagttaggag

SEQ ID NO: 39078 - DNA, 20 bp, Artificial Sequence
  Synthetic
aggtcatcaaagatgatatt

SEQ ID NO: 39079 - DNA, 20 bp, Artificial Sequence
  Synthetic
aagtagtactgtaatgggtt

SEQ ID NO: 39080 - DNA, 20 bp, Artificial Sequence
  Synthetic
aaacccattacagtactact

SEQ ID NO: 39081 - DNA, 20 bp, Artificial Sequence
  Synthetic
tcaccaagtagtactgtaat

SEQ ID NO: 39082 - DNA, 20 bp, Artificial Sequence
  Synthetic
ctcaccaagtagtactgtaa

SEQ ID NO: 39083 - DNA, 20 bp, Artificial Sequence
  Synthetic
cgagtggggtctgtttgcca

SEQ ID NO: 39084 - DNA, 20 bp, Artificial Sequence
  Synthetic
gtcagcagcaatgggttcca

SEQ ID NO: 39085 - DNA, 20 bp, Artificial Sequence
  Synthetic
acccattgctgctgacgaga

SEQ ID NO: 39086 - DNA, 20 bp, Artificial Sequence
  Synthetic
accatctcgtcagcagcaat

SEQ ID NO: 39087 - DNA, 20 bp, Artificial Sequence
  Synthetic
gaccatctcgtcagcagcaa

SEQ ID NO: 39088 - DNA, 20 bp, Artificial Sequence
  Synthetic
cgagatggtcatcgaatacg

SEQ ID NO: 39089 - DNA, 20 bp, Artificial Sequence
  Synthetic
gagatggtcatcgaatacgt

SEQ ID NO: 39090 - DNA, 20 bp, Artificial Sequence
  Synthetic
cgtgggtcagaacatccgtc

SEQ ID NO: 39091 - DNA, 20 bp, Artificial Sequence
  Synthetic
gggagtgcagcctcacctga

SEQ ID NO: 39092 - DNA, 20 bp, Artificial Sequence
  Synthetic
catctcaccctggcagatgg

SEQ ID NO: 39093 - DNA, 20 bp, Artificial Sequence
  Synthetic
ggcagatggtggccgacatg

SEQ ID NO: 39094 - DNA, 20 bp, Artificial Sequence
  Synthetic
gcagatggtggccgacatgc

SEQ ID NO: 39095 - DNA, 20 bp, Artificial Sequence
  Synthetic
gtagcgcttctcccgcatgt

SEQ ID NO: 39096 - DNA, 20 bp, Artificial Sequence
  Synthetic
gcgggagaagcgctacgtgc

SEQ ID NO: 39097 - DNA, 20 bp, Artificial Sequence
  Synthetic
ggagaagcgctacgtgcagg

SEQ ID NO: 39098 - DNA, 20 bp, Artificial Sequence
  Synthetic
gagaagcgctacgtgcagga

SEQ ID NO: 39099 - DNA, 20 bp, Artificial Sequence
  Synthetic
cgctacgtgcaggagggcat

SEQ ID NO: 39100 - DNA, 20 bp, Artificial Sequence
  Synthetic
ttggcagcagctacctgttc

SEQ ID NO: 39101 - DNA, 20 bp, Artificial Sequence
  Synthetic
tggcagcagctacctgttcc

SEQ ID NO: 39102 - DNA, 20 bp, Artificial Sequence
  Synthetic
cagcagctacctgttccggg

SEQ ID NO: 39103 - DNA, 20 bp, Artificial Sequence
  Synthetic
tgtcgtggtccacccggaac

SEQ ID NO: 39104 - DNA, 20 bp, Artificial Sequence
  Synthetic
tgatggtgtcgtggtccacc

SEQ ID NO: 39105 - DNA, 20 bp, Artificial Sequence
  Synthetic
tggcatcgatgatggtgtcg

SEQ ID NO: 39106 - DNA, 20 bp, Artificial Sequence
  Synthetic
acacttggtggcatcgatga

SEQ ID NO: 39107 - DNA, 20 bp, Artificial Sequence
  Synthetic
atcatcgatgccaccaagtg

SEQ ID NO: 39108 - DNA, 20 bp, Artificial Sequence
  Synthetic
tgccaccaagtgtggcaacc

SEQ ID NO: 39109 - DNA, 20 bp, Artificial Sequence
  Synthetic
ggccaggttgccacacttgg

SEQ ID NO: 39110 - DNA, 20 bp, Artificial Sequence
  Synthetic
tctggccaggttgccacact

SEQ ID NO: 39111 - DNA, 20 bp, Artificial Sequence
  Synthetic
agtggttgatgaatctggcc

SEQ ID NO: 39112 - DNA, 20 bp, Artificial Sequence
  Synthetic
gcagcagtggttgatgaatc

SEQ ID NO: 39113 - DNA, 20 bp, Artificial Sequence
  Synthetic
attcatcaaccactgctgca

SEQ ID NO: 39114 - DNA, 20 bp, Artificial Sequence
  Synthetic
cctggcgcaccgtgcagcag

SEQ ID NO: 39115 - DNA, 20 bp, Artificial Sequence
  Synthetic
gcagcctaactgctacgcca

SEQ ID NO: 39116 - DNA, 20 bp, Artificial Sequence
  Synthetic
atgaccttggcgtagcagtt

SEQ ID NO: 39117 - DNA, 20 bp, Artificial Sequence
  Synthetic
ggactcgatggtgatgacct

SEQ ID NO: 39118 - DNA, 20 bp, Artificial Sequence
  Synthetic
gatcttcttctgggactcga

SEQ ID NO: 39119 - DNA, 20 bp, Artificial Sequence
  Synthetic
gtagatcacgatcttcttct

SEQ ID NO: 39120 - DNA, 20 bp, Artificial Sequence
  Synthetic
agtagatcacgatcttcttc

SEQ ID NO: 39121 - DNA, 20 bp, Artificial Sequence
  Synthetic
atctactccaagcagcccat

SEQ ID NO: 39122 - DNA, 20 bp, Artificial Sequence
  Synthetic
ctccaagcagcccattggcg

SEQ ID NO: 39123 - DNA, 20 bp, Artificial Sequence
  Synthetic
gtccacgccaatgggctgct

SEQ ID NO: 39124 - DNA, 20 bp, Artificial Sequence
  Synthetic
gcagcccattggcgtggacg

SEQ ID NO: 39125 - DNA, 20 bp, Artificial Sequence
  Synthetic
atctcctcgtccacgccaat

SEQ ID NO: 39126 - DNA, 20 bp, Artificial Sequence
  Synthetic
gatctcctcgtccacgccaa

SEQ ID NO: 39127 - DNA, 20 bp, Artificial Sequence
  Synthetic
cagtgggaacttgtagtcgt

SEQ ID NO: 39128 - DNA, 20 bp, Artificial Sequence
  Synthetic
cgactggggcttgttcgcca

SEQ ID NO: 39129 - DNA, 20 bp, Artificial Sequence
  Synthetic
gttcgccatggagcccatcg

SEQ ID NO: 39130 - DNA, 20 bp, Artificial Sequence
  Synthetic
gtcagccgcgatgggctcca

SEQ ID NO: 39131 - DNA, 20 bp, Artificial Sequence
  Synthetic
gcccatcgcggctgacgaga

SEQ ID NO: 39132 - DNA, 20 bp, Artificial Sequence
  Synthetic
accatctcgtcagccgcgat

SEQ ID NO: 39133 - DNA, 20 bp, Artificial Sequence
  Synthetic
gaccatctcgtcagccgcga

SEQ ID NO: 39134 - DNA, 20 bp, Artificial Sequence
  Synthetic
cgagatggtcatcgagtacg

SEQ ID NO: 39135 - DNA, 20 bp, Artificial Sequence
  Synthetic
gagatggtcatcgagtacgt

SEQ ID NO: 39136 - DNA, 20 bp, Artificial Sequence
  Synthetic
cgtgggccagaatatccgtc

SEQ ID NO: 39137 - DNA, 20 bp, Artificial Sequence
  Synthetic
ggccagaatatccgtcaggt

SEQ ID NO: 39138 - DNA, 20 bp, Artificial Sequence
  Synthetic
tgcctacctgacggatattc

SEQ ID NO: 39139 - DNA, 20 bp, Artificial Sequence
  Synthetic
gccgggcggtgcctacctga

SEQ ID NO: 39140 - DNA, 20 bp, Artificial Sequence
  Synthetic
gccaggtgatcgcagacatg

SEQ ID NO: 39141 - DNA, 20 bp, Artificial Sequence
  Synthetic
cccgcatgtctgcgatcacc

SEQ ID NO: 39142 - DNA, 20 bp, Artificial Sequence
  Synthetic
ccaggtgatcgcagacatgc

SEQ ID NO: 39143 - DNA, 20 bp, Artificial Sequence
  Synthetic
catgcgggagaagcgttatg

SEQ ID NO: 39144 - DNA, 20 bp, Artificial Sequence
  Synthetic
ggagaagcgttatgaggacg

SEQ ID NO: 39145 - DNA, 20 bp, Artificial Sequence
  Synthetic
gagaagcgttatgaggacga

SEQ ID NO: 39146 - DNA, 20 bp, Artificial Sequence
  Synthetic
cgttatgaggacgagggcat

SEQ ID NO: 39147 - DNA, 20 bp, Artificial Sequence
  Synthetic
gttatgaggacgagggcatc

SEQ ID NO: 39148 - DNA, 20 bp, Artificial Sequence
  Synthetic
tcgggagcagctacatgttc

SEQ ID NO: 39149 - DNA, 20 bp, Artificial Sequence
  Synthetic
cgggagcagctacatgttcc

SEQ ID NO: 39150 - DNA, 20 bp, Artificial Sequence
  Synthetic
gagcagctacatgttccggg

SEQ ID NO: 39151 - DNA, 20 bp, Artificial Sequence
  Synthetic
tgatggtgtcatggtccacc

SEQ ID NO: 39152 - DNA, 20 bp, Artificial Sequence
  Synthetic
tggcgtcgatgatggtgtca

SEQ ID NO: 39153 - DNA, 20 bp, Artificial Sequence
  Synthetic
gcacttggtggcgtcgatga

SEQ ID NO: 39154 - DNA, 20 bp, Artificial Sequence
  Synthetic
atcatcgacgccaccaagtg

SEQ ID NO: 39155 - DNA, 20 bp, Artificial Sequence
  Synthetic
cgcgaagttgccgcacttgg

SEQ ID NO: 39156 - DNA, 20 bp, Artificial Sequence
  Synthetic
gcgcgcgaagttgccgcact

SEQ ID NO: 39157 - DNA, 20 bp, Artificial Sequence
  Synthetic
gggcactcacgttgcagctg

SEQ ID NO: 39158 - DNA, 20 bp, Artificial Sequence
  Synthetic
gcagcccaactgctatgcca

SEQ ID NO: 39159 - DNA, 20 bp, Artificial Sequence
  Synthetic
atcaccttggcatagcagtt

SEQ ID NO: 39160 - DNA, 20 bp, Artificial Sequence
  Synthetic
gatcaccttggcatagcagt

SEQ ID NO: 39161 - DNA, 20 bp, Artificial Sequence
  Synthetic
ctgctatgccaaggtgatca

SEQ ID NO: 39162 - DNA, 20 bp, Artificial Sequence
  Synthetic
ctatgccaaggtgatcacgg

SEQ ID NO: 39163 - DNA, 20 bp, Artificial Sequence
  Synthetic
tgactccaccgtgatcacct

SEQ ID NO: 39164 - DNA, 20 bp, Artificial Sequence
  Synthetic
gcagcacattaacgtcaatg

SEQ ID NO: 39165 - DNA, 20 bp, Artificial Sequence
  Synthetic
gatggggaacttatagtcat

SEQ ID NO: 39166 - DNA, 20 bp, Artificial Sequence
  Synthetic
tactcacagaaaagaaaggc

SEQ ID NO: 39167 - DNA, 20 bp, Artificial Sequence
  Synthetic
actcacagaaaagaaaggct

SEQ ID NO: 39168 - DNA, 20 bp, Artificial Sequence
  Synthetic
ctcacagaaaagaaaggctg

SEQ ID NO: 39169 - DNA, 20 bp, Artificial Sequence
  Synthetic
aacttacgaaggaaggtctt

SEQ ID NO: 39170 - DNA, 20 bp, Artificial Sequence
  Synthetic
aaaaaagaacttacgaagga

SEQ ID NO: 39171 - DNA, 20 bp, Artificial Sequence
  Synthetic
acctttgtcctagaatattg

SEQ ID NO: 39172 - DNA, 20 bp, Artificial Sequence
  Synthetic
tccacaatattctaggacaa

SEQ ID NO: 39173 - DNA, 20 bp, Artificial Sequence
  Synthetic
tgtcctagaatattgtggag

SEQ ID NO: 39174 - DNA, 20 bp, Artificial Sequence
  Synthetic
gtacctctccacaatattct

SEQ ID NO: 39175 - DNA, 20 bp, Artificial Sequence
  Synthetic
agagtttaaagctcgagtga

SEQ ID NO: 39176 - DNA, 20 bp, Artificial Sequence
  Synthetic
aaacatccattactatttca

SEQ ID NO: 39177 - DNA, 20 bp, Artificial Sequence
  Synthetic
tcagggccatgaaatagtaa

SEQ ID NO: 39178 - DNA, 20 bp, Artificial Sequence
  Synthetic
catggccctgaagaatgatg

SEQ ID NO: 39179 - DNA, 20 bp, Artificial Sequence
  Synthetic
gcttacctcatcattcttca

SEQ ID NO: 39180 - DNA, 20 bp, Artificial Sequence
  Synthetic
tgcttacctcatcattcttc

SEQ ID NO: 39181 - DNA, 20 bp, Artificial Sequence
  Synthetic
tttgagtggcatctattatc

SEQ ID NO: 39182 - DNA, 20 bp, Artificial Sequence
  Synthetic
ataatagatgccactcaaaa

SEQ ID NO: 39183 - DNA, 20 bp, Artificial Sequence
  Synthetic
agagcaatttcctttttgag

SEQ ID NO: 39184 - DNA, 20 bp, Artificial Sequence
  Synthetic
actttttgggtttcacaatt

SEQ ID NO: 39185 - DNA, 20 bp, Artificial Sequence
  Synthetic
tccacctcaacttacttttt

SEQ ID NO: 39186 - DNA, 20 bp, Artificial Sequence
  Synthetic
atccacctcaacttactttt

SEQ ID NO: 39187 - DNA, 20 bp, Artificial Sequence
  Synthetic
tcatctcagtggactgtgaa

SEQ ID NO: 39188 - DNA, 20 bp, Artificial Sequence
  Synthetic
ggactgtgaacggacaactg

SEQ ID NO: 39189 - DNA, 20 bp, Artificial Sequence
  Synthetic
gactgtgaacggacaactga

SEQ ID NO: 39190 - DNA, 20 bp, Artificial Sequence
  Synthetic
gtgaacggacaactgagggt

SEQ ID NO: 39191 - DNA, 20 bp, Artificial Sequence
  Synthetic
tgaacggacaactgagggtt

SEQ ID NO: 39192 - DNA, 20 bp, Artificial Sequence
  Synthetic
tgggttttttaccaccaaac

SEQ ID NO: 39193 - DNA, 20 bp, Artificial Sequence
  Synthetic
accaccaaactggttccttc

SEQ ID NO: 39194 - DNA, 20 bp, Artificial Sequence
  Synthetic
gcctgaaggaaccagtttgg

SEQ ID NO: 39195 - DNA, 20 bp, Artificial Sequence
  Synthetic
tgagcctgaaggaaccagtt

SEQ ID NO: 39196 - DNA, 20 bp, Artificial Sequence
  Synthetic
aacgttaactctgagcctga

SEQ ID NO: 39197 - DNA, 20 bp, Artificial Sequence
  Synthetic
aacttcaaagaagagggctt

SEQ ID NO: 39198 - DNA, 20 bp, Artificial Sequence
  Synthetic
gagagcaacaagagatatca

SEQ ID NO: 39199 - DNA, 20 bp, Artificial Sequence
  Synthetic
aggcagaagaattgttttta

SEQ ID NO: 39200 - DNA, 20 bp, Artificial Sequence
  Synthetic
ggcagaagaattgtttttat

SEQ ID NO: 39201 - DNA, 20 bp, Artificial Sequence
  Synthetic
acagtcattagcaattttcg

SEQ ID NO: 39202 - DNA, 20 bp, Artificial Sequence
  Synthetic
atctgctaaaaattcagtgt

SEQ ID NO: 39203 - DNA, 20 bp, Artificial Sequence
  Synthetic
tctgctaaaaattcagtgtt

SEQ ID NO: 39204 - DNA, 20 bp, Artificial Sequence
  Synthetic
attcggtcttgagaatataa

SEQ ID NO: 39205 - DNA, 20 bp, Artificial Sequence
  Synthetic
gattcggtcttgagaatata

SEQ ID NO: 39206 - DNA, 20 bp, Artificial Sequence
  Synthetic
agaccgaatccttcaagcca

SEQ ID NO: 39207 - DNA, 20 bp, Artificial Sequence
  Synthetic
gaccgaatccttcaagccat

SEQ ID NO: 39208 - DNA, 20 bp, Artificial Sequence
  Synthetic
ttcccatggcttgaaggatt

SEQ ID NO: 39209 - DNA, 20 bp, Artificial Sequence
  Synthetic
cgatgtttcccatggcttga

SEQ ID NO: 39210 - DNA, 20 bp, Artificial Sequence
  Synthetic
agccatgggaaacatcgcac

SEQ ID NO: 39211 - DNA, 20 bp, Artificial Sequence
  Synthetic
ggccagtgcgatgtttccca

SEQ ID NO: 39212 - DNA, 20 bp, Artificial Sequence
  Synthetic
tcgctcacacagcaaatgaa

SEQ ID NO: 39213 - DNA, 20 bp, Artificial Sequence
  Synthetic
gagccagccctaactccttc

SEQ ID NO: 39214 - DNA, 20 bp, Artificial Sequence
  Synthetic
ctgccagaaggagttagggc

SEQ ID NO: 39215 - DNA, 20 bp, Artificial Sequence
  Synthetic
agggctgccagaaggagtta

SEQ ID NO: 39216 - DNA, 20 bp, Artificial Sequence
  Synthetic
tagggctgccagaaggagtt

SEQ ID NO: 39217 - DNA, 20 bp, Artificial Sequence
  Synthetic
ttgaatatagggctgccaga

SEQ ID NO: 39218 - DNA, 20 bp, Artificial Sequence
  Synthetic
ctggggagggtttgaatata

SEQ ID NO: 39219 - DNA, 20 bp, Artificial Sequence
  Synthetic
actggggagggtttgaatat

SEQ ID NO: 39220 - DNA, 20 bp, Artificial Sequence
  Synthetic
agtgtcatattcactgggga

SEQ ID NO: 39221 - DNA, 20 bp, Artificial Sequence
  Synthetic
gagtgtcatattcactgggg

SEQ ID NO: 39222 - DNA, 20 bp, Artificial Sequence
  Synthetic
gaggagtgtcatattcactg

SEQ ID NO: 39223 - DNA, 20 bp, Artificial Sequence
  Synthetic
agaggagtgtcatattcact

SEQ ID NO: 39224 - DNA, 20 bp, Artificial Sequence
  Synthetic
gagaggagtgtcatattcac

SEQ ID NO: 39225 - DNA, 20 bp, Artificial Sequence
  Synthetic
tcatcttcttcaaagtagag

SEQ ID NO: 39226 - DNA, 20 bp, Artificial Sequence
  Synthetic
actttgaagaagatgaagtt

SEQ ID NO: 39227 - DNA, 20 bp, Artificial Sequence
  Synthetic
gacatcatgtatagcttgtg

SEQ ID NO: 39228 - DNA, 20 bp, Artificial Sequence
  Synthetic
gtcgagctgtgtttttatac

SEQ ID NO: 39229 - DNA, 20 bp, Artificial Sequence
  Synthetic
ctggatgactttatagaagt

SEQ ID NO: 39230 - DNA, 20 bp, Artificial Sequence
  Synthetic
ctacttctataaagtcatcc

SEQ ID NO: 39231 - DNA, 20 bp, Artificial Sequence
  Synthetic
tgttggcatgaggatgggtc

SEQ ID NO: 39232 - DNA, 20 bp, Artificial Sequence
  Synthetic
tagtttgttggcatgaggat

SEQ ID NO: 39233 - DNA, 20 bp, Artificial Sequence
  Synthetic
gtagtttgttggcatgagga

SEQ ID NO: 39234 - DNA, 20 bp, Artificial Sequence
  Synthetic
aagggtagtttgttggcatg

SEQ ID NO: 39235 - DNA, 20 bp, Artificial Sequence
  Synthetic
tgccaacaaactacccttga

SEQ ID NO: 39236 - DNA, 20 bp, Artificial Sequence
  Synthetic
atccttcaagggtagtttgt

SEQ ID NO: 39237 - DNA, 20 bp, Artificial Sequence
  Synthetic
taagtgaaagaatccttcaa

SEQ ID NO: 39238 - DNA, 20 bp, Artificial Sequence
  Synthetic
gtaagtgaaagaatccttca

SEQ ID NO: 39239 - DNA, 20 bp, Artificial Sequence
  Synthetic
gaaggattctttcacttacg

SEQ ID NO: 39240 - DNA, 20 bp, Artificial Sequence
  Synthetic
ctttcacttacgaggactac

SEQ ID NO: 39241 - DNA, 20 bp, Artificial Sequence
  Synthetic
cacttacgaggactacaggt

SEQ ID NO: 39242 - DNA, 20 bp, Artificial Sequence
  Synthetic
cagtctcttctgttatgacg

SEQ ID NO: 39243 - DNA, 20 bp, Artificial Sequence
  Synthetic
gcaaaaccaaattcccacag

SEQ ID NO: 39244 - DNA, 20 bp, Artificial Sequence
  Synthetic
aaccaaattcccacagagga

SEQ ID NO: 39245 - DNA, 20 bp, Artificial Sequence
  Synthetic
aaccatcctctgtgggaatt

SEQ ID NO: 39246 - DNA, 20 bp, Artificial Sequence
  Synthetic
acgcgggaaccatcctctgt

SEQ ID NO: 39247 - DNA, 20 bp, Artificial Sequence
  Synthetic
cacgcgggaaccatcctctg

SEQ ID NO: 39248 - DNA, 20 bp, Artificial Sequence
  Synthetic
ggatggttcccgcgtgaccc

SEQ ID NO: 39249 - DNA, 20 bp, Artificial Sequence
  Synthetic
aatcagagccagggtcacgc

SEQ ID NO: 39250 - DNA, 20 bp, Artificial Sequence
  Synthetic
gaatcagagccagggtcacg

SEQ ID NO: 39251 - DNA, 20 bp, Artificial Sequence
  Synthetic
ccataaaggaatcagagcca

SEQ ID NO: 39252 - DNA, 20 bp, Artificial Sequence
  Synthetic
ccctggctctgattccttta

SEQ ID NO: 39253 - DNA, 20 bp, Artificial Sequence
  Synthetic
cccataaaggaatcagagcc

SEQ ID NO: 39254 - DNA, 20 bp, Artificial Sequence
  Synthetic
cctggctctgattcctttat

SEQ ID NO: 39255 - DNA, 20 bp, Artificial Sequence
  Synthetic
tggttacacatatcccataa

SEQ ID NO: 39256 - DNA, 20 bp, Artificial Sequence
  Synthetic
gatatgtgtaaccacaccaa

SEQ ID NO: 39257 - DNA, 20 bp, Artificial Sequence
  Synthetic
gtgtaaccacaccaacggcc

SEQ ID NO: 39258 - DNA, 20 bp, Artificial Sequence
  Synthetic
tcgttaccaggccgttggtg

SEQ ID NO: 39259 - DNA, 20 bp, Artificial Sequence
  Synthetic
agaggtcgttaccaggccgt

SEQ ID NO: 39260 - DNA, 20 bp, Artificial Sequence
  Synthetic
tccccgggctagatcactac

SEQ ID NO: 39261 - DNA, 20 bp, Artificial Sequence
  Synthetic
gatcactactggttacaacc

SEQ ID NO: 39262 - DNA, 20 bp, Artificial Sequence
  Synthetic
actcacagcggtcatcttcc

SEQ ID NO: 39263 - DNA, 20 bp, Artificial Sequence
  Synthetic
agatgaccgctgtgagtgtg

SEQ ID NO: 39264 - DNA, 20 bp, Artificial Sequence
  Synthetic
gcagagccacacactcacag

SEQ ID NO: 39265 - DNA, 20 bp, Artificial Sequence
  Synthetic
ctgtgagtgtgtggctctgc

SEQ ID NO: 39266 - DNA, 20 bp, Artificial Sequence
  Synthetic
gtgtggctctgcaggatttt

SEQ ID NO: 39267 - DNA, 20 bp, Artificial Sequence
  Synthetic
tgtggctctgcaggattttc

SEQ ID NO: 39268 - DNA, 20 bp, Artificial Sequence
  Synthetic
gctctgcaggattttcgggc

SEQ ID NO: 39269 - DNA, 20 bp, Artificial Sequence
  Synthetic
ggattttcgggctggagagc

SEQ ID NO: 39270 - DNA, 20 bp, Artificial Sequence
  Synthetic
ttttcgggctggagagcagg

SEQ ID NO: 39271 - DNA, 20 bp, Artificial Sequence
  Synthetic
tttcgggctggagagcaggt

SEQ ID NO: 39272 - DNA, 20 bp, Artificial Sequence
  Synthetic
tctcagatttacatttttta

SEQ ID NO: 39273 - DNA, 20 bp, Artificial Sequence
  Synthetic
gctttcctaggtacaggaag

SEQ ID NO: 39274 - DNA, 20 bp, Artificial Sequence
  Synthetic
ctttcctaggtacaggaaga

SEQ ID NO: 39275 - DNA, 20 bp, Artificial Sequence
  Synthetic
gatgagtcaaacatccctgc

SEQ ID NO: 39276 - DNA, 20 bp, Artificial Sequence
  Synthetic
aagaacagttctcacctgca

SEQ ID NO: 39277 - DNA, 20 bp, Artificial Sequence
  Synthetic
aaagaacagttctcacctgc

SEQ ID NO: 39278 - DNA, 20 bp, Artificial Sequence
  Synthetic
aaataatcatctgtccctcc

SEQ ID NO: 39279 - DNA, 20 bp, Artificial Sequence
  Synthetic
gtggtgagcaggcaactctc

SEQ ID NO: 39280 - DNA, 20 bp, Artificial Sequence
  Synthetic
tgagagttgcctgctcacca

SEQ ID NO: 39281 - DNA, 20 bp, Artificial Sequence
  Synthetic
tcactgtgtccgtggtgagc

SEQ ID NO: 39282 - DNA, 20 bp, Artificial Sequence
  Synthetic
gcttcgaatcactgtgtccg

SEQ ID NO: 39283 - DNA, 20 bp, Artificial Sequence
  Synthetic
acagtgattcgaagctactt

SEQ ID NO: 39284 - DNA, 20 bp, Artificial Sequence
  Synthetic
cagtgattcgaagctactta

SEQ ID NO: 39285 - DNA, 20 bp, Artificial Sequence
  Synthetic
agtgattcgaagctacttag

SEQ ID NO: 39286 - DNA, 20 bp, Artificial Sequence
  Synthetic
gcctcctccatctcctctgc

SEQ ID NO: 39287 - DNA, 20 bp, Artificial Sequence
  Synthetic
gccagcagaggagatggagg

SEQ ID NO: 39288 - DNA, 20 bp, Artificial Sequence
  Synthetic
agcgccagcagaggagatgg

SEQ ID NO: 39289 - DNA, 20 bp, Artificial Sequence
  Synthetic
cacagcgccagcagaggaga

SEQ ID NO: 39290 - DNA, 20 bp, Artificial Sequence
  Synthetic
aaggtgcacagcgccagcag

SEQ ID NO: 39291 - DNA, 20 bp, Artificial Sequence
  Synthetic
atgcttttctgaaactaaaa

SEQ ID NO: 39292 - DNA, 20 bp, Artificial Sequence
  Synthetic
ttagtttcagaaaagcatgc

SEQ ID NO: 39293 - DNA, 20 bp, Artificial Sequence
  Synthetic
tagtttcagaaaagcatgct

SEQ ID NO: 39294 - DNA, 20 bp, Artificial Sequence
  Synthetic
atgctgggcaccgatctctt

SEQ ID NO: 39295 - DNA, 20 bp, Artificial Sequence
  Synthetic
ggtaaggcttccaaagagat

SEQ ID NO: 39296 - DNA, 20 bp, Artificial Sequence
  Synthetic
atctctttggaagccttacc

SEQ ID NO: 39297 - DNA, 20 bp, Artificial Sequence
  Synthetic
ttgggtaaaatctccaggta

SEQ ID NO: 39298 - DNA, 20 bp, Artificial Sequence
  Synthetic
ttacctggagattttaccca

SEQ ID NO: 39299 - DNA, 20 bp, Artificial Sequence
  Synthetic
acgccttgggtaaaatctcc

SEQ ID NO: 39300 - DNA, 20 bp, Artificial Sequence
  Synthetic
acagggcaggtatacgcctt

SEQ ID NO: 39301 - DNA, 20 bp, Artificial Sequence
  Synthetic
aacagggcaggtatacgcct

SEQ ID NO: 39302 - DNA, 20 bp, Artificial Sequence
  Synthetic
gtatacctgccctgtttgtt

SEQ ID NO: 39303 - DNA, 20 bp, Artificial Sequence
  Synthetic
cggctccaaacaaacagggc

SEQ ID NO: 39304 - DNA, 20 bp, Artificial Sequence
  Synthetic
ctgccctgtttgtttggagc

SEQ ID NO: 39305 - DNA, 20 bp, Artificial Sequence
  Synthetic
cttccggctccaaacaaaca

SEQ ID NO: 39306 - DNA, 20 bp, Artificial Sequence
  Synthetic
acttccggctccaaacaaac

SEQ ID NO: 39307 - DNA, 20 bp, Artificial Sequence
  Synthetic
tgtttgtttggagccggaag

SEQ ID NO: 39308 - DNA, 20 bp, Artificial Sequence
  Synthetic
ggaagaaggttcaccacttc

SEQ ID NO: 39309 - DNA, 20 bp, Artificial Sequence
  Synthetic
cttttaaagatttgggaaga

SEQ ID NO: 39310 - DNA, 20 bp, Artificial Sequence
  Synthetic
tcccaaatctttaaaagcaa

SEQ ID NO: 39311 - DNA, 20 bp, Artificial Sequence
  Synthetic
gcctttgcttttaaagattt

SEQ ID NO: 39312 - DNA, 20 bp, Artificial Sequence
  Synthetic
agcctttgcttttaaagatt

SEQ ID NO: 39313 - DNA, 20 bp, Artificial Sequence
  Synthetic
agagcagagagcccacgtgc

SEQ ID NO: 39314 - DNA, 20 bp, Artificial Sequence
  Synthetic
agcaaagaactcctgcacgt

SEQ ID NO: 39315 - DNA, 20 bp, Artificial Sequence
  Synthetic
aagcaaagaactcctgcacg

SEQ ID NO: 39316 - DNA, 20 bp, Artificial Sequence
  Synthetic
agaagagaaaaagtctctgg

SEQ ID NO: 39317 - DNA, 20 bp, Artificial Sequence
  Synthetic
cagagaagagaaaaagtctc

SEQ ID NO: 39318 - DNA, 20 bp, Artificial Sequence
  Synthetic
ttctctgcagcctctgtttg

SEQ ID NO: 39319 - DNA, 20 bp, Artificial Sequence
  Synthetic
tctgcagcctctgtttgcgg

SEQ ID NO: 39320 - DNA, 20 bp, Artificial Sequence
  Synthetic
tcaacagcctccgcaaacag

SEQ ID NO: 39321 - DNA, 20 bp, Artificial Sequence
  Synthetic
tcagctacagtgccctgctg

SEQ ID NO: 39322 - DNA, 20 bp, Artificial Sequence
  Synthetic
cagctacagtgccctgctgt

SEQ ID NO: 39323 - DNA, 20 bp, Artificial Sequence
  Synthetic
acagtgccctgctgtgggct

SEQ ID NO: 39324 - DNA, 20 bp, Artificial Sequence
  Synthetic
ggtgcaccaagcccacagca

SEQ ID NO: 39325 - DNA, 20 bp, Artificial Sequence
  Synthetic
cggtgcaccaagcccacagc

SEQ ID NO: 39326 - DNA, 20 bp, Artificial Sequence
  Synthetic
gtacacggctctggtgttga

SEQ ID NO: 39327 - DNA, 20 bp, Artificial Sequence
  Synthetic
acaccagagccgtgtacctg

SEQ ID NO: 39328 - DNA, 20 bp, Artificial Sequence
  Synthetic
gggcctcaggtacacggctc

SEQ ID NO: 39329 - DNA, 20 bp, Artificial Sequence
  Synthetic
gagccgtgtacctgaggccc

SEQ ID NO: 39330 - DNA, 20 bp, Artificial Sequence
  Synthetic
ctgcctgggcctcaggtaca

SEQ ID NO: 39331 - DNA, 20 bp, Artificial Sequence
  Synthetic
tgtacctgaggcccaggcag

SEQ ID NO: 39332 - DNA, 20 bp, Artificial Sequence
  Synthetic
gtacctgaggcccaggcagc

SEQ ID NO: 39333 - DNA, 20 bp, Artificial Sequence
  Synthetic
attcccgctgcctgggcctc

SEQ ID NO: 39334 - DNA, 20 bp, Artificial Sequence
  Synthetic
gaaaggcattcccgctgcct

SEQ ID NO: 39335 - DNA, 20 bp, Artificial Sequence
  Synthetic
agaaaggcattcccgctgcc

SEQ ID NO: 39336 - DNA, 20 bp, Artificial Sequence
  Synthetic
ggaatgcctttctgcagagc

SEQ ID NO: 39337 - DNA, 20 bp, Artificial Sequence
  Synthetic
aggtgtccggctctgcagaa

SEQ ID NO: 39338 - DNA, 20 bp, Artificial Sequence
  Synthetic
ggagcgagtgcacaggtgtc

SEQ ID NO: 39339 - DNA, 20 bp, Artificial Sequence
  Synthetic
caggtacggagcgagtgcac

SEQ ID NO: 39340 - DNA, 20 bp, Artificial Sequence
  Synthetic
ctgtgcactcgctccgtacc

SEQ ID NO: 39341 - DNA, 20 bp, Artificial Sequence
  Synthetic
tgattcagcaggtccaggta

SEQ ID NO: 39342 - DNA, 20 bp, Artificial Sequence
  Synthetic
ggctatgattcagcaggtcc

SEQ ID NO: 39343 - DNA, 20 bp, Artificial Sequence
  Synthetic
catgtgggctatgattcagc

SEQ ID NO: 39344 - DNA, 20 bp, Artificial Sequence
  Synthetic
gaatcatagcccacatgtcc

SEQ ID NO: 39345 - DNA, 20 bp, Artificial Sequence
  Synthetic
agcttctcacctggacatgt

SEQ ID NO: 39346 - DNA, 20 bp, Artificial Sequence
  Synthetic
cagcttctcacctggacatg

SEQ ID NO: 39347 - DNA, 20 bp, Artificial Sequence
  Synthetic
aaattagaacgacttcacgt

SEQ ID NO: 39348 - DNA, 20 bp, Artificial Sequence
  Synthetic
acgttggagaaagcatgaag

SEQ ID NO: 39349 - DNA, 20 bp, Artificial Sequence
  Synthetic
gaagaggtattcatctgtta

SEQ ID NO: 39350 - DNA, 20 bp, Artificial Sequence
  Synthetic
aaaagcaccggaagatcctg

SEQ ID NO: 39351 - DNA, 20 bp, Artificial Sequence
  Synthetic
aaagcaccggaagatcctga

SEQ ID NO: 39352 - DNA, 20 bp, Artificial Sequence
  Synthetic
ccaaatctcttgcagccctc

SEQ ID NO: 39353 - DNA, 20 bp, Artificial Sequence
  Synthetic
cctgagggctgcaagagatt

SEQ ID NO: 39354 - DNA, 20 bp, Artificial Sequence
  Synthetic
ggctgcaagagatttggctt

SEQ ID NO: 39355 - DNA, 20 bp, Artificial Sequence
  Synthetic
actcttataatagagtatcg

SEQ ID NO: 39356 - DNA, 20 bp, Artificial Sequence
  Synthetic
ctcttataatagagtatcgt

SEQ ID NO: 39357 - DNA, 20 bp, Artificial Sequence
  Synthetic
catgttacgacagcaatttg

SEQ ID NO: 39358 - DNA, 20 bp, Artificial Sequence
  Synthetic
cgacagcaatttgaggtcaa

SEQ ID NO: 39359 - DNA, 20 bp, Artificial Sequence
  Synthetic
gacagcaatttgaggtcaat

SEQ ID NO: 39360 - DNA, 20 bp, Artificial Sequence
  Synthetic
tagaagagcacaaaggggta

SEQ ID NO: 39361 - DNA, 20 bp, Artificial Sequence
  Synthetic
ttgagtagaagagcacaaag

SEQ ID NO: 39362 - DNA, 20 bp, Artificial Sequence
  Synthetic
tttgagtagaagagcacaaa

SEQ ID NO: 39363 - DNA, 20 bp, Artificial Sequence
  Synthetic
ttttgagtagaagagcacaa

SEQ ID NO: 39364 - DNA, 20 bp, Artificial Sequence
  Synthetic
ctcttctactcaaaattcaa

SEQ ID NO: 39365 - DNA, 20 bp, Artificial Sequence
  Synthetic
caatggtgtagagatgtgtg

SEQ ID NO: 39366 - DNA, 20 bp, Artificial Sequence
  Synthetic
tgtgtggatgcccgtacttt

SEQ ID NO: 39367 - DNA, 20 bp, Artificial Sequence
  Synthetic
agcatcattaccgaaagtac

SEQ ID NO: 39368 - DNA, 20 bp, Artificial Sequence
  Synthetic
gagcatcattaccgaaagta

SEQ ID NO: 39369 - DNA, 20 bp, Artificial Sequence
  Synthetic
gtactttcggtaatgatgct

SEQ ID NO: 39370 - DNA, 20 bp, Artificial Sequence
  Synthetic
atcatgtacaccaaatgcag

SEQ ID NO: 39371 - DNA, 20 bp, Artificial Sequence
  Synthetic
agatatcttacctctgcatt

SEQ ID NO: 39372 - DNA, 20 bp, Artificial Sequence
  Synthetic
gtgcgacacatgattgcaga

SEQ ID NO: 39373 - DNA, 20 bp, Artificial Sequence
  Synthetic
tgcgacacatgattgcagat

SEQ ID NO: 39374 - DNA, 20 bp, Artificial Sequence
  Synthetic
cagacacagcatagatgcac

SEQ ID NO: 39375 - DNA, 20 bp, Artificial Sequence
  Synthetic
tgctgtgtctgccatcacca

SEQ ID NO: 39376 - DNA, 20 bp, Artificial Sequence
  Synthetic
tgccatcaccaaggatgctg

SEQ ID NO: 39377 - DNA, 20 bp, Artificial Sequence
  Synthetic
gacctcagcatccttggtga

SEQ ID NO: 39378 - DNA, 20 bp, Artificial Sequence
  Synthetic
tatggtgacctcagcatcct

SEQ ID NO: 39379 - DNA, 20 bp, Artificial Sequence
  Synthetic
cagggcacggtggccggcta

SEQ ID NO: 39380 - DNA, 20 bp, Artificial Sequence
  Synthetic
cacggtggccggctacggca

SEQ ID NO: 39381 - DNA, 20 bp, Artificial Sequence
  Synthetic
ggtggccggctacggcatgg

SEQ ID NO: 39382 - DNA, 20 bp, Artificial Sequence
  Synthetic
ccgggccaccatgccgtagc

SEQ ID NO: 39383 - DNA, 20 bp, Artificial Sequence
  Synthetic
ccggctacggcatggtggcc

SEQ ID NO: 39384 - DNA, 20 bp, Artificial Sequence
  Synthetic
cggctacggcatggtggccc

SEQ ID NO: 39385 - DNA, 20 bp, Artificial Sequence
  Synthetic
ggtggcccgggagagcgtgc

SEQ ID NO: 39386 - DNA, 20 bp, Artificial Sequence
  Synthetic
gcccgggagagcgtgcaggc

SEQ ID NO: 39387 - DNA, 20 bp, Artificial Sequence
  Synthetic
tccggcctgcacgctctccc

SEQ ID NO: 39388 - DNA, 20 bp, Artificial Sequence
  Synthetic
ctccggcctgcacgctctcc

SEQ ID NO: 39389 - DNA, 20 bp, Artificial Sequence
  Synthetic
ggccggagagctgttgttcg

SEQ ID NO: 39390 - DNA, 20 bp, Artificial Sequence
  Synthetic
caccacgaacaacagctctc

SEQ ID NO: 39391 - DNA, 20 bp, Artificial Sequence
  Synthetic
agctgttgttcgtggtgccg

SEQ ID NO: 39392 - DNA, 20 bp, Artificial Sequence
  Synthetic
gctgttgttcgtggtgccgc

SEQ ID NO: 39393 - DNA, 20 bp, Artificial Sequence
  Synthetic
tgcgacaggagcgcggcccg

SEQ ID NO: 39394 - DNA, 20 bp, Artificial Sequence
  Synthetic
ggtgtgctgcgacaggagcg

SEQ ID NO: 39395 - DNA, 20 bp, Artificial Sequence
  Synthetic
tggagcaggtgtgctgcgac

SEQ ID NO: 39396 - DNA, 20 bp, Artificial Sequence
  Synthetic
tcgcagcacacctgctccat

SEQ ID NO: 39397 - DNA, 20 bp, Artificial Sequence
  Synthetic
cagcacacctgctccatcgg

SEQ ID NO: 39398 - DNA, 20 bp, Artificial Sequence
  Synthetic
cagcaggccgccgatggagc

SEQ ID NO: 39399 - DNA, 20 bp, Artificial Sequence
  Synthetic
ctgctccatcggcggcctgc

SEQ ID NO: 39400 - DNA, 20 bp, Artificial Sequence
  Synthetic
tcgctccagcaggccgccga

SEQ ID NO: 39401 - DNA, 20 bp, Artificial Sequence
  Synthetic
atcggcggcctgctggagcg

SEQ ID NO: 39402 - DNA, 20 bp, Artificial Sequence
  Synthetic
ggcggcctgctggagcgagg

SEQ ID NO: 39403 - DNA, 20 bp, Artificial Sequence
  Synthetic
gcggcctgctggagcgaggt

SEQ ID NO: 39404 - DNA, 20 bp, Artificial Sequence
  Synthetic
cgtgcccacctcgctccagc

SEQ ID NO: 39405 - DNA, 20 bp, Artificial Sequence
  Synthetic
agttgcgctgcagagccagt

SEQ ID NO: 39406 - DNA, 20 bp, Artificial Sequence
  Synthetic
gttgcgctgcagagccagtc

SEQ ID NO: 39407 - DNA, 20 bp, Artificial Sequence
  Synthetic
cgctgcagagccagtcgggc

SEQ ID NO: 39408 - DNA, 20 bp, Artificial Sequence
  Synthetic
gctgcagagccagtcgggct

SEQ ID NO: 39409 - DNA, 20 bp, Artificial Sequence
  Synthetic
gcagtggcacccagcccgac

SEQ ID NO: 39410 - DNA, 20 bp, Artificial Sequence
  Synthetic
gggctgggtgccactgctgc

SEQ ID NO: 39411 - DNA, 20 bp, Artificial Sequence
  Synthetic
tggagcagcgccagcagcag

SEQ ID NO: 39412 - DNA, 20 bp, Artificial Sequence
  Synthetic
ggcgctgctccacgagctgc

SEQ ID NO: 39413 - DNA, 20 bp, Artificial Sequence
  Synthetic
gctccacgagctgcaggccc

SEQ ID NO: 39414 - DNA, 20 bp, Artificial Sequence
  Synthetic
aggccggggcctgcagctcg

SEQ ID NO: 39415 - DNA, 20 bp, Artificial Sequence
  Synthetic
tgcaggccccggcctcacgc

SEQ ID NO: 39416 - DNA, 20 bp, Artificial Sequence
  Synthetic
aggccccggcctcacgctgg

SEQ ID NO: 39417 - DNA, 20 bp, Artificial Sequence
  Synthetic
gggcctccagcgtgaggccg

SEQ ID NO: 39418 - DNA, 20 bp, Artificial Sequence
  Synthetic
agggcctccagcgtgaggcc

SEQ ID NO: 39419 - DNA, 20 bp, Artificial Sequence
  Synthetic
tagggcctccagcgtgaggc

SEQ ID NO: 39420 - DNA, 20 bp, Artificial Sequence
  Synthetic
aaagtagggcctccagcgtg

SEQ ID NO: 39421 - DNA, 20 bp, Artificial Sequence
  Synthetic
ggaggccctactttgcgctc

SEQ ID NO: 39422 - DNA, 20 bp, Artificial Sequence
  Synthetic
tcgggccagagcgcaaagta

SEQ ID NO: 39423 - DNA, 20 bp, Artificial Sequence
  Synthetic
ctcgggccagagcgcaaagt

SEQ ID NO: 39424 - DNA, 20 bp, Artificial Sequence
  Synthetic
ctttgcgctctggcccgagc

SEQ ID NO: 39425 - DNA, 20 bp, Artificial Sequence
  Synthetic
tttgcgctctggcccgagct

SEQ ID NO: 39426 - DNA, 20 bp, Artificial Sequence
  Synthetic
ctggcccgagctgggccgct

SEQ ID NO: 39427 - DNA, 20 bp, Artificial Sequence
  Synthetic
tgctccaagcggcccagctc

SEQ ID NO: 39428 - DNA, 20 bp, Artificial Sequence
  Synthetic
gtgctccaagcggcccagct

SEQ ID NO: 39429 - DNA, 20 bp, Artificial Sequence
  Synthetic
agaacatcgggtgctccaag

SEQ ID NO: 39430 - DNA, 20 bp, Artificial Sequence
  Synthetic
gcttggagcacccgatgttc

SEQ ID NO: 39431 - DNA, 20 bp, Artificial Sequence
  Synthetic
aaggctctcaccagaacatc

SEQ ID NO: 39432 - DNA, 20 bp, Artificial Sequence
  Synthetic
caaggctctcaccagaacat

SEQ ID NO: 39433 - DNA, 20 bp, Artificial Sequence
  Synthetic
tgggtgtccctgcaggccag

SEQ ID NO: 39434 - DNA, 20 bp, Artificial Sequence
  Synthetic
gtgtccctgcaggccagagg

SEQ ID NO: 39435 - DNA, 20 bp, Artificial Sequence
  Synthetic
gcaggccagaggaggagcgc

SEQ ID NO: 39436 - DNA, 20 bp, Artificial Sequence
  Synthetic
aggcaccggcgctcctcctc

SEQ ID NO: 39437 - DNA, 20 bp, Artificial Sequence
  Synthetic
ggagcgccggtgcctgctcc

SEQ ID NO: 39438 - DNA, 20 bp, Artificial Sequence
  Synthetic
gagcgccggtgcctgctcca

SEQ ID NO: 39439 - DNA, 20 bp, Artificial Sequence
  Synthetic
ctgtgccctggagcaggcac

SEQ ID NO: 39440 - DNA, 20 bp, Artificial Sequence
  Synthetic
cggtgcctgctccagggcac

SEQ ID NO: 39441 - DNA, 20 bp, Artificial Sequence
  Synthetic
gtacgcctgtgccctggagc

SEQ ID NO: 39442 - DNA, 20 bp, Artificial Sequence
  Synthetic
cctcaggtacgcctgtgccc

SEQ ID NO: 39443 - DNA, 20 bp, Artificial Sequence
  Synthetic
ccagggcacaggcgtacctg

SEQ ID NO: 39444 - DNA, 20 bp, Artificial Sequence
  Synthetic
cacaggcgtacctgaggccg

SEQ ID NO: 39445 - DNA, 20 bp, Artificial Sequence
  Synthetic
cgtacctgaggccgtggaga

SEQ ID NO: 39446 - DNA, 20 bp, Artificial Sequence
  Synthetic
aaatccttctccacggcctc

SEQ ID NO: 39447 - DNA, 20 bp, Artificial Sequence
  Synthetic
tgaggccgtggagaaggatt

SEQ ID NO: 39448 - DNA, 20 bp, Artificial Sequence
  Synthetic
gttggccaaatccttctcca

SEQ ID NO: 39449 - DNA, 20 bp, Artificial Sequence
  Synthetic
ctggtactcgctgcggatgt

SEQ ID NO: 39450 - DNA, 20 bp, Artificial Sequence
  Synthetic
cgatggactggtactcgctg

SEQ ID NO: 39451 - DNA, 20 bp, Artificial Sequence
  Synthetic
tgaagggcagcacgatggac

SEQ ID NO: 39452 - DNA, 20 bp, Artificial Sequence
  Synthetic
gtccatcgtgctgcccttca

SEQ ID NO: 39453 - DNA, 20 bp, Artificial Sequence
  Synthetic
ttccatgaagggcagcacga

SEQ ID NO: 39454 - DNA, 20 bp, Artificial Sequence
  Synthetic
tcggggtgggcttccatgaa

SEQ ID NO: 39455 - DNA, 20 bp, Artificial Sequence
  Synthetic
atcggggtgggcttccatga

SEQ ID NO: 39456 - DNA, 20 bp, Artificial Sequence
  Synthetic
gaggctgaagagatcggggt

SEQ ID NO: 39457 - DNA, 20 bp, Artificial Sequence
  Synthetic
tgaggctgaagagatcgggg

SEQ ID NO: 39458 - DNA, 20 bp, Artificial Sequence
  Synthetic
accccgatctcttcagcctc

SEQ ID NO: 39459 - DNA, 20 bp, Artificial Sequence
  Synthetic
ccctgaggctgaagagatcg

SEQ ID NO: 39460 - DNA, 20 bp, Artificial Sequence
  Synthetic
ccccgatctcttcagcctca

SEQ ID NO: 39461 - DNA, 20 bp, Artificial Sequence
  Synthetic
accctgaggctgaagagatc

SEQ ID NO: 39462 - DNA, 20 bp, Artificial Sequence
  Synthetic
aaccctgaggctgaagagat

SEQ ID NO: 39463 - DNA, 20 bp, Artificial Sequence
  Synthetic
gttctagggagcgaaccctg

SEQ ID NO: 39464 - DNA, 20 bp, Artificial Sequence
  Synthetic
cagctggtggtagagttcta

SEQ ID NO: 39465 - DNA, 20 bp, Artificial Sequence
  Synthetic
ccagctggtggtagagttct

SEQ ID NO: 39466 - DNA, 20 bp, Artificial Sequence
  Synthetic
cctagaactctaccaccagc

SEQ ID NO: 39467 - DNA, 20 bp, Artificial Sequence
  Synthetic
agaactctaccaccagctgg

SEQ ID NO: 39468 - DNA, 20 bp, Artificial Sequence
  Synthetic
tcacaagggccaccagctgg

SEQ ID NO: 39469 - DNA, 20 bp, Artificial Sequence
  Synthetic
ccatcacaagggccaccagc

SEQ ID NO: 39470 - DNA, 20 bp, Artificial Sequence
  Synthetic
ccagctggtggcccttgtga

SEQ ID NO: 39471 - DNA, 20 bp, Artificial Sequence
  Synthetic
tggcccttgtgatggcctat

SEQ ID NO: 39472 - DNA, 20 bp, Artificial Sequence
  Synthetic
tgacctataggccatcacaa

SEQ ID NO: 39473 - DNA, 20 bp, Artificial Sequence
  Synthetic
ctgacctataggccatcaca

SEQ ID NO: 39474 - DNA, 20 bp, Artificial Sequence
  Synthetic
ggccccacccactgacctat

SEQ ID NO: 39475 - DNA, 20 bp, Artificial Sequence
  Synthetic
ttctgtcaatggcagctttc

SEQ ID NO: 39476 - DNA, 20 bp, Artificial Sequence
  Synthetic
tggcagctttcaggaaccac

SEQ ID NO: 39477 - DNA, 20 bp, Artificial Sequence
  Synthetic
cagctttcaggaaccactgg

SEQ ID NO: 39478 - DNA, 20 bp, Artificial Sequence
  Synthetic
ggaaccactggaggaagaag

SEQ ID NO: 39479 - DNA, 20 bp, Artificial Sequence
  Synthetic
tcatcctcttcttcctccag

SEQ ID NO: 39480 - DNA, 20 bp, Artificial Sequence
  Synthetic
ggaggaagaagaggatgaaa

SEQ ID NO: 39481 - DNA, 20 bp, Artificial Sequence
  Synthetic
ggagcccaactcccccgtga

SEQ ID NO: 39482 - DNA, 20 bp, Artificial Sequence
  Synthetic
ggcaccatcacgggggagtt

SEQ ID NO: 39483 - DNA, 20 bp, Artificial Sequence
  Synthetic
aggcaccatcacgggggagt

SEQ ID NO: 39484 - DNA, 20 bp, Artificial Sequence
  Synthetic
tgcagcaggcaccatcacgg

SEQ ID NO: 39485 - DNA, 20 bp, Artificial Sequence
  Synthetic
ctgcagcaggcaccatcacg

SEQ ID NO: 39486 - DNA, 20 bp, Artificial Sequence
  Synthetic
tctgcagcaggcaccatcac

SEQ ID NO: 39487 - DNA, 20 bp, Artificial Sequence
  Synthetic
gtctgcagcaggcaccatca

SEQ ID NO: 39488 - DNA, 20 bp, Artificial Sequence
  Synthetic
tggtttagtatgtctgcagc

SEQ ID NO: 39489 - DNA, 20 bp, Artificial Sequence
  Synthetic
tggcgttgtgattggctaag

SEQ ID NO: 39490 - DNA, 20 bp, Artificial Sequence
  Synthetic
ttctagattggcgttgtgat

SEQ ID NO: 39491 - DNA, 20 bp, Artificial Sequence
  Synthetic
cgccaatctagaatactctg

SEQ ID NO: 39492 - DNA, 20 bp, Artificial Sequence
  Synthetic
caccgcagagtattctagat

SEQ ID NO: 39493 - DNA, 20 bp, Artificial Sequence
  Synthetic
tttcacctcagaattgtctt

SEQ ID NO: 39494 - DNA, 20 bp, Artificial Sequence
  Synthetic
acctcagaattgtcttcgga

SEQ ID NO: 39495 - DNA, 20 bp, Artificial Sequence
  Synthetic
gccactcagcccattcctaa

SEQ ID NO: 39496 - DNA, 20 bp, Artificial Sequence
  Synthetic
gcctttaggaatgggctgag

SEQ ID NO: 39497 - DNA, 20 bp, Artificial Sequence
  Synthetic
atctcatggcctttaggaat

SEQ ID NO: 39498 - DNA, 20 bp, Artificial Sequence
  Synthetic
aatctcatggcctttaggaa

SEQ ID NO: 39499 - DNA, 20 bp, Artificial Sequence
  Synthetic
ttgaaaatctcatggccttt

SEQ ID NO: 39500 - DNA, 20 bp, Artificial Sequence
  Synthetic
cataagtgttgaaaatctca

SEQ ID NO: 39501 - DNA, 20 bp, Artificial Sequence
  Synthetic
catgagattttcaacactta

SEQ ID NO: 39502 - DNA, 20 bp, Artificial Sequence
  Synthetic
atgagattttcaacacttat

SEQ ID NO: 39503 - DNA, 20 bp, Artificial Sequence
  Synthetic
tggagaaggacttttttcaa

SEQ ID NO: 39504 - DNA, 20 bp, Artificial Sequence
  Synthetic
acttttttcaaaggtagctg

SEQ ID NO: 39505 - DNA, 20 bp, Artificial Sequence
  Synthetic
cttttttcaaaggtagctgt

SEQ ID NO: 39506 - DNA, 20 bp, Artificial Sequence
  Synthetic
taaaaagacataacagtatt

SEQ ID NO: 39507 - DNA, 20 bp, Artificial Sequence
  Synthetic
actgttatgtctttttataa

SEQ ID NO: 39508 - DNA, 20 bp, Artificial Sequence
  Synthetic
agttcgaattacacaccaag

SEQ ID NO: 39509 - DNA, 20 bp, Artificial Sequence
  Synthetic
tgtcagccccactcacctct

SEQ ID NO: 39510 - DNA, 20 bp, Artificial Sequence
  Synthetic
gttttctgcaggttgacagc

SEQ ID NO: 39511 - DNA, 20 bp, Artificial Sequence
  Synthetic
ttttctgcaggttgacagca

SEQ ID NO: 39512 - DNA, 20 bp, Artificial Sequence
  Synthetic
tgcaggttgacagcagggac

SEQ ID NO: 39513 - DNA, 20 bp, Artificial Sequence
  Synthetic
gcaggttgacagcagggact

SEQ ID NO: 39514 - DNA, 20 bp, Artificial Sequence
  Synthetic
agcagggactgggcccttaa

SEQ ID NO: 39515 - DNA, 20 bp, Artificial Sequence
  Synthetic
gcagggactgggcccttaat

SEQ ID NO: 39516 - DNA, 20 bp, Artificial Sequence
  Synthetic
ggagagggtgttcccattaa

SEQ ID NO: 39517 - DNA, 20 bp, Artificial Sequence
  Synthetic
gggagagggtgttcccatta

SEQ ID NO: 39518 - DNA, 20 bp, Artificial Sequence
  Synthetic
cgtttcttcatcaagggaga

SEQ ID NO: 39519 - DNA, 20 bp, Artificial Sequence
  Synthetic
ccgtttcttcatcaagggag

SEQ ID NO: 39520 - DNA, 20 bp, Artificial Sequence
  Synthetic
cctctcccttgatgaagaaa

SEQ ID NO: 39521 - DNA, 20 bp, Artificial Sequence
  Synthetic
aatgaccgtttcttcatcaa

SEQ ID NO: 39522 - DNA, 20 bp, Artificial Sequence
  Synthetic
caatgaccgtttcttcatca

SEQ ID NO: 39523 - DNA, 20 bp, Artificial Sequence
  Synthetic
gatacgtggttatagggctc

SEQ ID NO: 39524 - DNA, 20 bp, Artificial Sequence
  Synthetic
tacttggatacgtggttata

SEQ ID NO: 39525 - DNA, 20 bp, Artificial Sequence
  Synthetic
gtacttggatacgtggttat

SEQ ID NO: 39526 - DNA, 20 bp, Artificial Sequence
  Synthetic
aggcacagtacttggatacg

SEQ ID NO: 39527 - DNA, 20 bp, Artificial Sequence
  Synthetic
atccaagtactgtgcctcct

SEQ ID NO: 39528 - DNA, 20 bp, Artificial Sequence
  Synthetic
tccaagtactgtgcctcctt

SEQ ID NO: 39529 - DNA, 20 bp, Artificial Sequence
  Synthetic
tcccaaggaggcacagtact

SEQ ID NO: 39530 - DNA, 20 bp, Artificial Sequence
  Synthetic
ctgtgcctccttgggacaca

SEQ ID NO: 39531 - DNA, 20 bp, Artificial Sequence
  Synthetic
atttgccttgtgtcccaagg

SEQ ID NO: 39532 - DNA, 20 bp, Artificial Sequence
  Synthetic
gtgatttgccttgtgtccca

SEQ ID NO: 39533 - DNA, 20 bp, Artificial Sequence
  Synthetic
gtagatgcagtttggagtga

SEQ ID NO: 39534 - DNA, 20 bp, Artificial Sequence
  Synthetic
tacatatcgtagatgcagtt

SEQ ID NO: 39535 - DNA, 20 bp, Artificial Sequence
  Synthetic
aggtttgtccacccccgttt

SEQ ID NO: 39536 - DNA, 20 bp, Artificial Sequence
  Synthetic
ggtttgtccacccccgtttt

SEQ ID NO: 39537 - DNA, 20 bp, Artificial Sequence
  Synthetic
tgatgggcccaaaacggggg

SEQ ID NO: 39538 - DNA, 20 bp, Artificial Sequence
  Synthetic
atttgatgggcccaaaacgg

SEQ ID NO: 39539 - DNA, 20 bp, Artificial Sequence
  Synthetic
catttgatgggcccaaaacg

SEQ ID NO: 39540 - DNA, 20 bp, Artificial Sequence
  Synthetic
gcatttgatgggcccaaaac

SEQ ID NO: 39541 - DNA, 20 bp, Artificial Sequence
  Synthetic
tgcatttgatgggcccaaaa

SEQ ID NO: 39542 - DNA, 20 bp, Artificial Sequence
  Synthetic
agggtgcggatgcatttgat

SEQ ID NO: 39543 - DNA, 20 bp, Artificial Sequence
  Synthetic
cagggtgcggatgcatttga

SEQ ID NO: 39544 - DNA, 20 bp, Artificial Sequence
  Synthetic
catccgcaccctgagagcag

SEQ ID NO: 39545 - DNA, 20 bp, Artificial Sequence
  Synthetic
cctccactgctctcagggtg

SEQ ID NO: 39546 - DNA, 20 bp, Artificial Sequence
  Synthetic
ccgcaccctgagagcagtgg

SEQ ID NO: 39547 - DNA, 20 bp, Artificial Sequence
  Synthetic
atcggcctccactgctctca

SEQ ID NO: 39548 - DNA, 20 bp, Artificial Sequence
  Synthetic
catcggcctccactgctctc

SEQ ID NO: 39549 - DNA, 20 bp, Artificial Sequence
  Synthetic
ggcaacggtgagctcttcat

SEQ ID NO: 39550 - DNA, 20 bp, Artificial Sequence
  Synthetic
gaagagctcaccgttgccta

SEQ ID NO: 39551 - DNA, 20 bp, Artificial Sequence
  Synthetic
gtggtcatagccataggcaa

SEQ ID NO: 39552 - DNA, 20 bp, Artificial Sequence
  Synthetic
ggggctgtggtcatagccat

SEQ ID NO: 39553 - DNA, 20 bp, Artificial Sequence
  Synthetic
catactgtcccacagccaga

SEQ ID NO: 39554 - DNA, 20 bp, Artificial Sequence
  Synthetic
atcaaaatatcaagacctac

SEQ ID NO: 39555 - DNA, 20 bp, Artificial Sequence
  Synthetic
cttgatgttcaactgccagt

SEQ ID NO: 39556 - DNA, 20 bp, Artificial Sequence
  Synthetic
ctactggcagttgaacatca

SEQ ID NO: 39557 - DNA, 20 bp, Artificial Sequence
  Synthetic
tactggcagttgaacatcaa

SEQ ID NO: 39558 - DNA, 20 bp, Artificial Sequence
  Synthetic
actggcagttgaacatcaag

SEQ ID NO: 39559 - DNA, 20 bp, Artificial Sequence
  Synthetic
aagaatttcttctggtttaa

SEQ ID NO: 39560 - DNA, 20 bp, Artificial Sequence
  Synthetic
gtcttgtaaagaatttcttc

SEQ ID NO: 39561 - DNA, 20 bp, Artificial Sequence
  Synthetic
agaaattctttacaagactt

SEQ ID NO: 39562 - DNA, 20 bp, Artificial Sequence
  Synthetic
gaaattctttacaagacttt

SEQ ID NO: 39563 - DNA, 20 bp, Artificial Sequence
  Synthetic
aatcaatgagctagttgctt

SEQ ID NO: 39564 - DNA, 20 bp, Artificial Sequence
  Synthetic
aaatcaatgagctagttgct

SEQ ID NO: 39565 - DNA, 20 bp, Artificial Sequence
  Synthetic
actagctcattgatttctgc

SEQ ID NO: 39566 - DNA, 20 bp, Artificial Sequence
  Synthetic
tcattgatttctgctggaaa

SEQ ID NO: 39567 - DNA, 20 bp, Artificial Sequence
  Synthetic
aaaggtgtcttcgttactaa

SEQ ID NO: 39568 - DNA, 20 bp, Artificial Sequence
  Synthetic
tgtcttcgttactaaaggat

SEQ ID NO: 39569 - DNA, 20 bp, Artificial Sequence
  Synthetic
actaaaggattggtaccaaa

SEQ ID NO: 39570 - DNA, 20 bp, Artificial Sequence
  Synthetic
atagatacgactgcgccttt

SEQ ID NO: 39571 - DNA, 20 bp, Artificial Sequence
  Synthetic
gcagtcgtatctatgtatcc

SEQ ID NO: 39572 - DNA, 20 bp, Artificial Sequence
  Synthetic
ccaatggactggaaaaagat

SEQ ID NO: 39573 - DNA, 20 bp, Artificial Sequence
  Synthetic
taaacggatttccaatggac

SEQ ID NO: 39574 - DNA, 20 bp, Artificial Sequence
  Synthetic
aaaaataaacggatttccaa

SEQ ID NO: 39575 - DNA, 20 bp, Artificial Sequence
  Synthetic
tccaggcatctaaaaataaa

SEQ ID NO: 39576 - DNA, 20 bp, Artificial Sequence
  Synthetic
catcaatgagtaccccatcc

SEQ ID NO: 39577 - DNA, 20 bp, Artificial Sequence
  Synthetic
ctggatggggtactcattga

SEQ ID NO: 39578 - DNA, 20 bp, Artificial Sequence
  Synthetic
tggatggggtactcattgat

SEQ ID NO: 39579 - DNA, 20 bp, Artificial Sequence
  Synthetic
ctcattgatgggaatgacaa

SEQ ID NO: 39580 - DNA, 20 bp, Artificial Sequence
  Synthetic
tcattgatgggaatgacaaa

SEQ ID NO: 39581 - DNA, 20 bp, Artificial Sequence
  Synthetic
ggatatcaaaagttgtgtac

SEQ ID NO: 39582 - DNA, 20 bp, Artificial Sequence
  Synthetic
acttgtttcagatcttgcaa

SEQ ID NO: 39583 - DNA, 20 bp, Artificial Sequence
  Synthetic
cttgtttcagatcttgcaat

SEQ ID NO: 39584 - DNA, 20 bp, Artificial Sequence
  Synthetic
gtttcagatcttgcaatggg

SEQ ID NO: 39585 - DNA, 20 bp, Artificial Sequence
  Synthetic
tttcagatcttgcaatggga

SEQ ID NO: 39586 - DNA, 20 bp, Artificial Sequence
  Synthetic
tgcaatgggagggatcgact

SEQ ID NO: 39587 - DNA, 20 bp, Artificial Sequence
  Synthetic
taaaaatgagtgatagtaca

SEQ ID NO: 39588 - DNA, 20 bp, Artificial Sequence
  Synthetic
gtcagaaattcataaccctc

SEQ ID NO: 39589 - DNA, 20 bp, Artificial Sequence
  Synthetic
aattcataaccctctggctg

SEQ ID NO: 39590 - DNA, 20 bp, Artificial Sequence
  Synthetic
attcataaccctctggctgt

SEQ ID NO: 39591 - DNA, 20 bp, Artificial Sequence
  Synthetic
acatactgtcccacagccag

SEQ ID NO: 39592 - DNA, 20 bp, Artificial Sequence
  Synthetic
tatgtcaacaattgttccaa

SEQ ID NO: 39593 - DNA, 20 bp, Artificial Sequence
  Synthetic
ccatgatgccttcttaccat

SEQ ID NO: 39594 - DNA, 20 bp, Artificial Sequence
  Synthetic
agcagctaatgtctgttatc

SEQ ID NO: 39595 - DNA, 20 bp, Artificial Sequence
  Synthetic
agttctatagggaaaactgc

SEQ ID NO: 39596 - DNA, 20 bp, Artificial Sequence
  Synthetic
gatactgcttcagttctata

SEQ ID NO: 39597 - DNA, 20 bp, Artificial Sequence
  Synthetic
agatactgcttcagttctat

SEQ ID NO: 39598 - DNA, 20 bp, Artificial Sequence
  Synthetic
tcatagctgtaggcaatgtt

SEQ ID NO: 39599 - DNA, 20 bp, Artificial Sequence
  Synthetic
cctttgtttgtcatagctgt

SEQ ID NO: 39600 - DNA, 20 bp, Artificial Sequence
  Synthetic
cctacagctatgacaaacaa

SEQ ID NO: 39601 - DNA, 20 bp, Artificial Sequence
  Synthetic
caagaacaacacatcgaagt

SEQ ID NO: 39602 - DNA, 20 bp, Artificial Sequence
  Synthetic
acaagaacaacacatcgaag

SEQ ID NO: 39603 - DNA, 20 bp, Artificial Sequence
  Synthetic
gtgttgttcttgtcgcactt

SEQ ID NO: 39604 - DNA, 20 bp, Artificial Sequence
  Synthetic
tgttgttcttgtcgcactta

SEQ ID NO: 39605 - DNA, 20 bp, Artificial Sequence
  Synthetic
gcacttagggacatcaatca

SEQ ID NO: 39606 - DNA, 20 bp, Artificial Sequence
  Synthetic
tattttgatttaacagattc

SEQ ID NO: 39607 - DNA, 20 bp, Artificial Sequence
  Synthetic
ccgatctttttccagtccat

SEQ ID NO: 39608 - DNA, 20 bp, Artificial Sequence
  Synthetic
tccgtttatttttagatgcc

SEQ ID NO: 39609 - DNA, 20 bp, Artificial Sequence
  Synthetic
tttatttttagatgcctgga

SEQ ID NO: 39610 - DNA, 20 bp, Artificial Sequence
  Synthetic
ttatttttagatgcctggat

SEQ ID NO: 39611 - DNA, 20 bp, Artificial Sequence
  Synthetic
tatttttagatgcctggatg

SEQ ID NO: 39612 - DNA, 20 bp, Artificial Sequence
  Synthetic
tactatcactcatttttaaa

SEQ ID NO: 39613 - DNA, 20 bp, Artificial Sequence
  Synthetic
gtactatcactcatttttaa

SEQ ID NO: 39614 - DNA, 20 bp, Artificial Sequence
  Synthetic
tcaagacacagaacaagggc

SEQ ID NO: 39615 - DNA, 20 bp, Artificial Sequence
  Synthetic
caagacacagaacaagggct

SEQ ID NO: 39616 - DNA, 20 bp, Artificial Sequence
  Synthetic
aagacacagaacaagggctg

SEQ ID NO: 39617 - DNA, 20 bp, Artificial Sequence
  Synthetic
gggctggggtatccgctgct

SEQ ID NO: 39618 - DNA, 20 bp, Artificial Sequence
  Synthetic
tggcaatgtcatccaagcag

SEQ ID NO: 39619 - DNA, 20 bp, Artificial Sequence
  Synthetic
tgcttggatgacattgccaa

SEQ ID NO: 39620 - DNA, 20 bp, Artificial Sequence
  Synthetic
aatacaaacaaaagagcctt

SEQ ID NO: 39621 - DNA, 20 bp, Artificial Sequence
  Synthetic
tcttttgtttgtatttatgc

SEQ ID NO: 39622 - DNA, 20 bp, Artificial Sequence
  Synthetic
ttgtttgtatttatgcaggt

SEQ ID NO: 39623 - DNA, 20 bp, Artificial Sequence
  Synthetic
tgtctgcaaagtcatctgtc

SEQ ID NO: 39624 - DNA, 20 bp, Artificial Sequence
  Synthetic
gacagatgactttgcagaca

SEQ ID NO: 39625 - DNA, 20 bp, Artificial Sequence
  Synthetic
agatgactttgcagacaagg

SEQ ID NO: 39626 - DNA, 20 bp, Artificial Sequence
  Synthetic
gatgactttgcagacaagga

SEQ ID NO: 39627 - DNA, 20 bp, Artificial Sequence
  Synthetic
ctttgcagacaaggagggtc

SEQ ID NO: 39628 - DNA, 20 bp, Artificial Sequence
  Synthetic
agacaaggagggtctggaaa

SEQ ID NO: 39629 - DNA, 20 bp, Artificial Sequence
  Synthetic
gacaaggagggtctggaaat

SEQ ID NO: 39630 - DNA, 20 bp, Artificial Sequence
  Synthetic
tgatgagtactttgcaaatc

SEQ ID NO: 39631 - DNA, 20 bp, Artificial Sequence
  Synthetic
tctggaccatatcgagagcg

SEQ ID NO: 39632 - DNA, 20 bp, Artificial Sequence
  Synthetic
agttctccacgctctcgata

SEQ ID NO: 39633 - DNA, 20 bp, Artificial Sequence
  Synthetic
agcgtggagaacttcaaaga

SEQ ID NO: 39634 - DNA, 20 bp, Artificial Sequence
  Synthetic
actgctgtcagaggaacagg

SEQ ID NO: 39635 - DNA, 20 bp, Artificial Sequence
  Synthetic
cactgctgtcagaggaacag

SEQ ID NO: 39636 - DNA, 20 bp, Artificial Sequence
  Synthetic
ccactgctgtcagaggaaca

SEQ ID NO: 39637 - DNA, 20 bp, Artificial Sequence
  Synthetic
ccctgttcctctgacagcag

SEQ ID NO: 39638 - DNA, 20 bp, Artificial Sequence
  Synthetic
accactgctgtcagaggaac

SEQ ID NO: 39639 - DNA, 20 bp, Artificial Sequence
  Synthetic
gtctacaccactgctgtcag

SEQ ID NO: 39640 - DNA, 20 bp, Artificial Sequence
  Synthetic
cagcagtggtgtagacttga

SEQ ID NO: 39641 - DNA, 20 bp, Artificial Sequence
  Synthetic
tggtgtagacttgaaggacc

SEQ ID NO: 39642 - DNA, 20 bp, Artificial Sequence
  Synthetic
gacttgaaggaccaggaaga

SEQ ID NO: 39643 - DNA, 20 bp, Artificial Sequence
  Synthetic
gaccaggaagatggcaacag

SEQ ID NO: 39644 - DNA, 20 bp, Artificial Sequence
  Synthetic
taccgctgttgccatcttcc

SEQ ID NO: 39645 - DNA, 20 bp, Artificial Sequence
  Synthetic
agatggcaacagcggtacag

SEQ ID NO: 39646 - DNA, 20 bp, Artificial Sequence
  Synthetic
tatcatcattggactcttca

SEQ ID NO: 39647 - DNA, 20 bp, Artificial Sequence
  Synthetic
ctatcatcattggactcttc

SEQ ID NO: 39648 - DNA, 20 bp, Artificial Sequence
  Synthetic
atcatctgagctatcatcat

SEQ ID NO: 39649 - DNA, 20 bp, Artificial Sequence
  Synthetic
ctcagatgataacttctgta

SEQ ID NO: 39650 - DNA, 20 bp, Artificial Sequence
  Synthetic
tgataacttctgtaaggatg

SEQ ID NO: 39651 - DNA, 20 bp, Artificial Sequence
  Synthetic
acttcagcaccagttcagtg

SEQ ID NO: 39652 - DNA, 20 bp, Artificial Sequence
  Synthetic
tcagcaccagttcagtgtgg

SEQ ID NO: 39653 - DNA, 20 bp, Artificial Sequence
  Synthetic
atagctccgccacactgaac

SEQ ID NO: 39654 - DNA, 20 bp, Artificial Sequence
  Synthetic
tgtggcggagctatgctacc

SEQ ID NO: 39655 - DNA, 20 bp, Artificial Sequence
  Synthetic
ggcggagctatgctacccgg

SEQ ID NO: 39656 - DNA, 20 bp, Artificial Sequence
  Synthetic
atgctacccggaggcagacc

SEQ ID NO: 39657 - DNA, 20 bp, Artificial Sequence
  Synthetic
tgctacccggaggcagaccc

SEQ ID NO: 39658 - DNA, 20 bp, Artificial Sequence
  Synthetic
gctacccggaggcagacccg

SEQ ID NO: 39659 - DNA, 20 bp, Artificial Sequence
  Synthetic
ctggccccgggtctgcctcc

SEQ ID NO: 39660 - DNA, 20 bp, Artificial Sequence
  Synthetic
tctggccccgggtctgcctc

SEQ ID NO: 39661 - DNA, 20 bp, Artificial Sequence
  Synthetic
acccggggccagaaagagaa

SEQ ID NO: 39662 - DNA, 20 bp, Artificial Sequence
  Synthetic
tccgttctctttctggcccc

SEQ ID NO: 39663 - DNA, 20 bp, Artificial Sequence
  Synthetic
gtccgttctctttctggccc

SEQ ID NO: 39664 - DNA, 20 bp, Artificial Sequence
  Synthetic
cagagagtccgttctctttc

SEQ ID NO: 39665 - DNA, 20 bp, Artificial Sequence
  Synthetic
actctctgagacaacttcca

SEQ ID NO: 39666 - DNA, 20 bp, Artificial Sequence
  Synthetic
atctggggggtgggagtcct

SEQ ID NO: 39667 - DNA, 20 bp, Artificial Sequence
  Synthetic
gactcccaccccccagatct

SEQ ID NO: 39668 - DNA, 20 bp, Artificial Sequence
  Synthetic
gggtccaagatctggggggt

SEQ ID NO: 39669 - DNA, 20 bp, Artificial Sequence
  Synthetic
ggggtccaagatctgggggg

SEQ ID NO: 39670 - DNA, 20 bp, Artificial Sequence
  Synthetic
gtgggggtccaagatctggg

SEQ ID NO: 39671 - DNA, 20 bp, Artificial Sequence
  Synthetic
tgtgggggtccaagatctgg

SEQ ID NO: 39672 - DNA, 20 bp, Artificial Sequence
  Synthetic
atgtgggggtccaagatctg

SEQ ID NO: 39673 - DNA, 20 bp, Artificial Sequence
  Synthetic
tatgtgggggtccaagatct

SEQ ID NO: 39674 - DNA, 20 bp, Artificial Sequence
  Synthetic
atatgtgggggtccaagatc

SEQ ID NO: 39675 - DNA, 20 bp, Artificial Sequence
  Synthetic
ggaggaacaggaatatgtgg

SEQ ID NO: 39676 - DNA, 20 bp, Artificial Sequence
  Synthetic
gggaggaacaggaatatgtg

SEQ ID NO: 39677 - DNA, 20 bp, Artificial Sequence
  Synthetic
agggaggaacaggaatatgt

SEQ ID NO: 39678 - DNA, 20 bp, Artificial Sequence
  Synthetic
gagggaggaacaggaatatg

SEQ ID NO: 39679 - DNA, 20 bp, Artificial Sequence
  Synthetic
acagggattgagggaggaac

SEQ ID NO: 39680 - DNA, 20 bp, Artificial Sequence
  Synthetic
gttcctccctcaatccctgt

SEQ ID NO: 39681 - DNA, 20 bp, Artificial Sequence
  Synthetic
ccacctacagggattgaggg

SEQ ID NO: 39682 - DNA, 20 bp, Artificial Sequence
  Synthetic
cctccctcaatccctgtagg

SEQ ID NO: 39683 - DNA, 20 bp, Artificial Sequence
  Synthetic
cagccacctacagggattga

SEQ ID NO: 39684 - DNA, 20 bp, Artificial Sequence
  Synthetic
gcagccacctacagggattg

SEQ ID NO: 39685 - DNA, 20 bp, Artificial Sequence
  Synthetic
gtggattgcagccacctaca

SEQ ID NO: 39686 - DNA, 20 bp, Artificial Sequence
  Synthetic
ggtggattgcagccacctac

SEQ ID NO: 39687 - DNA, 20 bp, Artificial Sequence
  Synthetic
ggtgtctcttcggaggaagg

SEQ ID NO: 39688 - DNA, 20 bp, Artificial Sequence
  Synthetic
ttgggtgtctcttcggagga

SEQ ID NO: 39689 - DNA, 20 bp, Artificial Sequence
  Synthetic
gttcttgggtgtctcttcgg

SEQ ID NO: 39690 - DNA, 20 bp, Artificial Sequence
  Synthetic
cttgttcttgggtgtctctt

SEQ ID NO: 39691 - DNA, 20 bp, Artificial Sequence
  Synthetic
cgaagagacacccaagaaca

SEQ ID NO: 39692 - DNA, 20 bp, Artificial Sequence
  Synthetic
agagacacccaagaacaagg

SEQ ID NO: 39693 - DNA, 20 bp, Artificial Sequence
  Synthetic
catgaggccaccttgttctt

SEQ ID NO: 39694 - DNA, 20 bp, Artificial Sequence
  Synthetic
ccatgaggccaccttgttct

SEQ ID NO: 39695 - DNA, 20 bp, Artificial Sequence
  Synthetic
ccaagaacaaggtggcctca

SEQ ID NO: 39696 - DNA, 20 bp, Artificial Sequence
  Synthetic
actattgcagctcaaccatg

SEQ ID NO: 39697 - DNA, 20 bp, Artificial Sequence
  Synthetic
agctgcaatagtgtcagtga

SEQ ID NO: 39698 - DNA, 20 bp, Artificial Sequence
  Synthetic
tgcaatagtgtcagtgaagg

SEQ ID NO: 39699 - DNA, 20 bp, Artificial Sequence
  Synthetic
cattagtcttgaaggatgaa

SEQ ID NO: 39700 - DNA, 20 bp, Artificial Sequence
  Synthetic
tcatccttcaagactaatga

SEQ ID NO: 39701 - DNA, 20 bp, Artificial Sequence
  Synthetic
tccttcaagactaatgaagg

SEQ ID NO: 39702 - DNA, 20 bp, Artificial Sequence
  Synthetic
cccaccttcattagtcttga

SEQ ID NO: 39703 - DNA, 20 bp, Artificial Sequence
  Synthetic
ccttcaagactaatgaaggt

SEQ ID NO: 39704 - DNA, 20 bp, Artificial Sequence
  Synthetic
cttcaagactaatgaaggtg

SEQ ID NO: 39705 - DNA, 20 bp, Artificial Sequence
  Synthetic
caagactaatgaaggtgggg

SEQ ID NO: 39706 - DNA, 20 bp, Artificial Sequence
  Synthetic
aagactaatgaaggtgggga

SEQ ID NO: 39707 - DNA, 20 bp, Artificial Sequence
  Synthetic
ctaatgaaggtggggagggc

SEQ ID NO: 39708 - DNA, 20 bp, Artificial Sequence
  Synthetic
taatgaaggtggggagggcc

SEQ ID NO: 39709 - DNA, 20 bp, Artificial Sequence
  Synthetic
gaaggtggggagggccgggc

SEQ ID NO: 39710 - DNA, 20 bp, Artificial Sequence
  Synthetic
aaggtggggagggccgggct

SEQ ID NO: 39711 - DNA, 20 bp, Artificial Sequence
  Synthetic
aggtggggagggccgggctg

SEQ ID NO: 39712 - DNA, 20 bp, Artificial Sequence
  Synthetic
ggtggggagggccgggctgg

SEQ ID NO: 39713 - DNA, 20 bp, Artificial Sequence
  Synthetic
ccattcggcttcccccagcc

SEQ ID NO: 39714 - DNA, 20 bp, Artificial Sequence
  Synthetic
ccgggctgggggaagccgaa

SEQ ID NO: 39715 - DNA, 20 bp, Artificial Sequence
  Synthetic
ggctgggggaagccgaatgg

SEQ ID NO: 39716 - DNA, 20 bp, Artificial Sequence
  Synthetic
aagccgaatggaggctgaga

SEQ ID NO: 39717 - DNA, 20 bp, Artificial Sequence
  Synthetic
aggccttctcagcctccatt

SEQ ID NO: 39718 - DNA, 20 bp, Artificial Sequence
  Synthetic
gctgagaaggcctccacctc

SEQ ID NO: 39719 - DNA, 20 bp, Artificial Sequence
  Synthetic
aaggcctccacctcaggact

SEQ ID NO: 39720 - DNA, 20 bp, Artificial Sequence
  Synthetic
gatgcctagtcctgaggtgg

SEQ ID NO: 39721 - DNA, 20 bp, Artificial Sequence
  Synthetic
cttgatgcctagtcctgagg

SEQ ID NO: 39722 - DNA, 20 bp, Artificial Sequence
  Synthetic
cacctcaggactaggcatca

SEQ ID NO: 39723 - DNA, 20 bp, Artificial Sequence
  Synthetic
atccttgatgcctagtcctg

SEQ ID NO: 39724 - DNA, 20 bp, Artificial Sequence
  Synthetic
aggactaggcatcaaggatg

SEQ ID NO: 39725 - DNA, 20 bp, Artificial Sequence
  Synthetic
ggactaggcatcaaggatga

SEQ ID NO: 39726 - DNA, 20 bp, Artificial Sequence
  Synthetic
ggatgagggagacatcaaac

SEQ ID NO: 39727 - DNA, 20 bp, Artificial Sequence
  Synthetic
catcaaacaggccaagaaag

SEQ ID NO: 39728 - DNA, 20 bp, Artificial Sequence
  Synthetic
gccactgcttacctctttct

SEQ ID NO: 39729 - DNA, 20 bp, Artificial Sequence
  Synthetic
tgtttcggtcgtcagtgtcc

SEQ ID NO: 39730 - DNA, 20 bp, Artificial Sequence
  Synthetic
cttacactgacatcttgttt

SEQ ID NO: 39731 - DNA, 20 bp, Artificial Sequence
  Synthetic
actgaaagctctcgaaatta

SEQ ID NO: 39732 - DNA, 20 bp, Artificial Sequence
  Synthetic
ccttcaggcttcacaggaga

SEQ ID NO: 39733 - DNA, 20 bp, Artificial Sequence
  Synthetic
ccttctcctgtgaagcctga

SEQ ID NO: 39734 - DNA, 20 bp, Artificial Sequence
  Synthetic
cgaagtccttcaggcttcac

SEQ ID NO: 39735 - DNA, 20 bp, Artificial Sequence
  Synthetic
ggtgggcggcgaagtccttc

SEQ ID NO: 39736 - DNA, 20 bp, Artificial Sequence
  Synthetic
tactagtcttactaggtggg

SEQ ID NO: 39737 - DNA, 20 bp, Artificial Sequence
  Synthetic
gcatactagtcttactaggt

SEQ ID NO: 39738 - DNA, 20 bp, Artificial Sequence
  Synthetic
tgcatactagtcttactagg

SEQ ID NO: 39739 - DNA, 20 bp, Artificial Sequence
  Synthetic
tgatgcatactagtcttact

SEQ ID NO: 39740 - DNA, 20 bp, Artificial Sequence
  Synthetic
gcatcaaagccgaagactca

SEQ ID NO: 39741 - DNA, 20 bp, Artificial Sequence
  Synthetic
gagcagaagccatgagtctt

SEQ ID NO: 39742 - DNA, 20 bp, Artificial Sequence
  Synthetic
gaggtgacttacatcagggt

SEQ ID NO: 39743 - DNA, 20 bp, Artificial Sequence
  Synthetic
gcttgaggtgacttacatca

SEQ ID NO: 39744 - DNA, 20 bp, Artificial Sequence
  Synthetic
agcttgaggtgacttacatc

SEQ ID NO: 39745 - DNA, 20 bp, Artificial Sequence
  Synthetic
tggacagtgtcaggacatcc

SEQ ID NO: 39746 - DNA, 20 bp, Artificial Sequence
  Synthetic
ctgtgctgctggacagtgtc

SEQ ID NO: 39747 - DNA, 20 bp, Artificial Sequence
  Synthetic
gtccagcagcacagaaagtg

SEQ ID NO: 39748 - DNA, 20 bp, Artificial Sequence
  Synthetic
tccagcagcacagaaagtga

SEQ ID NO: 39749 - DNA, 20 bp, Artificial Sequence
  Synthetic
cccctcactttctgtgctgc

SEQ ID NO: 39750 - DNA, 20 bp, Artificial Sequence
  Synthetic
ccagcagcacagaaagtgag

SEQ ID NO: 39751 - DNA, 20 bp, Artificial Sequence
  Synthetic
cagcagcacagaaagtgagg

SEQ ID NO: 39752 - DNA, 20 bp, Artificial Sequence
  Synthetic
acagaaagtgagggggaaag

SEQ ID NO: 39753 - DNA, 20 bp, Artificial Sequence
  Synthetic
cagaaagtgagggggaaagt

SEQ ID NO: 39754 - DNA, 20 bp, Artificial Sequence
  Synthetic
accagccgaaagcccactgc

SEQ ID NO: 39755 - DNA, 20 bp, Artificial Sequence
  Synthetic
accagcagtgggctttcggc

SEQ ID NO: 39756 - DNA, 20 bp, Artificial Sequence
  Synthetic
tctgaccagcagtgggcttt

SEQ ID NO: 39757 - DNA, 20 bp, Artificial Sequence
  Synthetic
gcccactgctggtcagactt

SEQ ID NO: 39758 - DNA, 20 bp, Artificial Sequence
  Synthetic
gccgaagtctgaccagcagt

SEQ ID NO: 39759 - DNA, 20 bp, Artificial Sequence
  Synthetic
agccgaagtctgaccagcag

SEQ ID NO: 39760 - DNA, 20 bp, Artificial Sequence
  Synthetic
tggtcagacttcggctacag

SEQ ID NO: 39761 - DNA, 20 bp, Artificial Sequence
  Synthetic
gatatccagaccatatcctc

SEQ ID NO: 39762 - DNA, 20 bp, Artificial Sequence
  Synthetic
cagagccagaggatatggtc

SEQ ID NO: 39763 - DNA, 20 bp, Artificial Sequence
  Synthetic
accatatcctctggctctga

SEQ ID NO: 39764 - DNA, 20 bp, Artificial Sequence
  Synthetic
cccttcagagccagaggata

SEQ ID NO: 39765 - DNA, 20 bp, Artificial Sequence
  Synthetic
ccatatcctctggctctgaa

SEQ ID NO: 39766 - DNA, 20 bp, Artificial Sequence
  Synthetic
catatcctctggctctgaag

SEQ ID NO: 39767 - DNA, 20 bp, Artificial Sequence
  Synthetic
gtcatccccttcagagccag

SEQ ID NO: 39768 - DNA, 20 bp, Artificial Sequence
  Synthetic
ctctgaaggggatgactttg

SEQ ID NO: 39769 - DNA, 20 bp, Artificial Sequence
  Synthetic
gaggacaagaagaacatgac

SEQ ID NO: 39770 - DNA, 20 bp, Artificial Sequence
  Synthetic
acttgacgcttcattggacc

SEQ ID NO: 39771 - DNA, 20 bp, Artificial Sequence
  Synthetic
aggtccaatgaagcgtcaag

SEQ ID NO: 39772 - DNA, 20 bp, Artificial Sequence
  Synthetic
actgccacttgacgcttcat

SEQ ID NO: 39773 - DNA, 20 bp, Artificial Sequence
  Synthetic
gtggcagtaaaatcaacccg

SEQ ID NO: 39774 - DNA, 20 bp, Artificial Sequence
  Synthetic
tgatttaagagcaaagcctc

SEQ ID NO: 39775 - DNA, 20 bp, Artificial Sequence
  Synthetic
ttgatttaagagcaaagcct

SEQ ID NO: 39776 - DNA, 20 bp, Artificial Sequence
  Synthetic
tttgctcttaaatcaaccca

SEQ ID NO: 39777 - DNA, 20 bp, Artificial Sequence
  Synthetic
ttgctcttaaatcaacccat

SEQ ID NO: 39778 - DNA, 20 bp, Artificial Sequence
  Synthetic
tgatttaattgcaatcccat

SEQ ID NO: 39779 - DNA, 20 bp, Artificial Sequence
  Synthetic
ttgatttaattgcaatccca

SEQ ID NO: 39780 - DNA, 20 bp, Artificial Sequence
  Synthetic
tgcaattaaatcaaccaaca

SEQ ID NO: 39781 - DNA, 20 bp, Artificial Sequence
  Synthetic
atcaaccaacatggcctctg

SEQ ID NO: 39782 - DNA, 20 bp, Artificial Sequence
  Synthetic
cttgtccacagaggccatgt

SEQ ID NO: 39783 - DNA, 20 bp, Artificial Sequence
  Synthetic
caacatggcctctgtggaca

SEQ ID NO: 39784 - DNA, 20 bp, Artificial Sequence
  Synthetic
aacatggcctctgtggacaa

SEQ ID NO: 39785 - DNA, 20 bp, Artificial Sequence
  Synthetic
acatggcctctgtggacaag

SEQ ID NO: 39786 - DNA, 20 bp, Artificial Sequence
  Synthetic
catggcctctgtggacaagg

SEQ ID NO: 39787 - DNA, 20 bp, Artificial Sequence
  Synthetic
gctctcccccttgtccacag

SEQ ID NO: 39788 - DNA, 20 bp, Artificial Sequence
  Synthetic
tggcgtgtgttcttacgaac

SEQ ID NO: 39789 - DNA, 20 bp, Artificial Sequence
  Synthetic
aacacacgccaattctatga

SEQ ID NO: 39790 - DNA, 20 bp, Artificial Sequence
  Synthetic
acgccaattctatgatggcg

SEQ ID NO: 39791 - DNA, 20 bp, Artificial Sequence
  Synthetic
actcctcgccatcatagaat

SEQ ID NO: 39792 - DNA, 20 bp, Artificial Sequence
  Synthetic
atcattgatgccaagcttga

SEQ ID NO: 39793 - DNA, 20 bp, Artificial Sequence
  Synthetic
tgccaagcttgaaggcaacc

SEQ ID NO: 39794 - DNA, 20 bp, Artificial Sequence
  Synthetic
gccaagcttgaaggcaacct

SEQ ID NO: 39795 - DNA, 20 bp, Artificial Sequence
  Synthetic
gcccaggttgccttcaagct

SEQ ID NO: 39796 - DNA, 20 bp, Artificial Sequence
  Synthetic
tcacgttgaggtagcggccc

SEQ ID NO: 39797 - DNA, 20 bp, Artificial Sequence
  Synthetic
ggggtctcacgttgaggtag

SEQ ID NO: 39798 - DNA, 20 bp, Artificial Sequence
  Synthetic
gggagaggggtctcacgttg

SEQ ID NO: 39799 - DNA, 20 bp, Artificial Sequence
  Synthetic
cattctggacaaacaggttg

SEQ ID NO: 39800 - DNA, 20 bp, Artificial Sequence
  Synthetic
acattctggacaaacaggtt

SEQ ID NO: 39801 - DNA, 20 bp, Artificial Sequence
  Synthetic
gacattctggacaaacaggt

SEQ ID NO: 39802 - DNA, 20 bp, Artificial Sequence
  Synthetic
cgaagacattctggacaaac

SEQ ID NO: 39803 - DNA, 20 bp, Artificial Sequence
  Synthetic
gtttgtccagaatgtcttcg

SEQ ID NO: 39804 - DNA, 20 bp, Artificial Sequence
  Synthetic
gggtatccacgaagacattc

SEQ ID NO: 39805 - DNA, 20 bp, Artificial Sequence
  Synthetic
ccaggggaagcgaagatcat

SEQ ID NO: 39806 - DNA, 20 bp, Artificial Sequence
  Synthetic
cccatgatcttcgcttcccc

SEQ ID NO: 39807 - DNA, 20 bp, Artificial Sequence
  Synthetic
cccaggggaagcgaagatca

SEQ ID NO: 39808 - DNA, 20 bp, Artificial Sequence
  Synthetic
ccatgatcttcgcttcccct

SEQ ID NO: 39809 - DNA, 20 bp, Artificial Sequence
  Synthetic
tgatcttcgcttcccctggg

SEQ ID NO: 39810 - DNA, 20 bp, Artificial Sequence
  Synthetic
tggcaaagaaggccacccag

SEQ ID NO: 39811 - DNA, 20 bp, Artificial Sequence
  Synthetic
ctggcaaagaaggccaccca

SEQ ID NO: 39812 - DNA, 20 bp, Artificial Sequence
  Synthetic
gctggcaaagaaggccaccc

SEQ ID NO: 39813 - DNA, 20 bp, Artificial Sequence
  Synthetic
tccttacttgctggcaaaga

SEQ ID NO: 39814 - DNA, 20 bp, Artificial Sequence
  Synthetic
tttcctgactccttacttgc

SEQ ID NO: 39815 - DNA, 20 bp, Artificial Sequence
  Synthetic
tcttcctcttcagaagaatc

SEQ ID NO: 39816 - DNA, 20 bp, Artificial Sequence
  Synthetic
cttcctcttcagaagaatcc

SEQ ID NO: 39817 - DNA, 20 bp, Artificial Sequence
  Synthetic
ctcttcagaagaatccgggc

SEQ ID NO: 39818 - DNA, 20 bp, Artificial Sequence
  Synthetic
tcttcagaagaatccgggct

SEQ ID NO: 39819 - DNA, 20 bp, Artificial Sequence
  Synthetic
aagtaagttctgtcccagcc

SEQ ID NO: 39820 - DNA, 20 bp, Artificial Sequence
  Synthetic
gggctgggacagaacttact

SEQ ID NO: 39821 - DNA, 20 bp, Artificial Sequence
  Synthetic
ggctgggacagaacttactt

SEQ ID NO: 39822 - DNA, 20 bp, Artificial Sequence
  Synthetic
tatattttggacatcactta

SEQ ID NO: 39823 - DNA, 20 bp, Artificial Sequence
  Synthetic
atattttggacatcacttat

SEQ ID NO: 39824 - DNA, 20 bp, Artificial Sequence
  Synthetic
tttggacatcacttatggga

SEQ ID NO: 39825 - DNA, 20 bp, Artificial Sequence
  Synthetic
atctcattgacacaggatag

SEQ ID NO: 39826 - DNA, 20 bp, Artificial Sequence
  Synthetic
aatctcattgacacaggata

SEQ ID NO: 39827 - DNA, 20 bp, Artificial Sequence
  Synthetic
caatctcattgacacaggat

SEQ ID NO: 39828 - DNA, 20 bp, Artificial Sequence
  Synthetic
tgtgtcaatctcattgacac

SEQ ID NO: 39829 - DNA, 20 bp, Artificial Sequence
  Synthetic
tgacacaacccctccacccc

SEQ ID NO: 39830 - DNA, 20 bp, Artificial Sequence
  Synthetic
cacaacccctccaccccagg

SEQ ID NO: 39831 - DNA, 20 bp, Artificial Sequence
  Synthetic
gtaggccacctggggtggag

SEQ ID NO: 39832 - DNA, 20 bp, Artificial Sequence
  Synthetic
tgtaggccacctggggtgga

SEQ ID NO: 39833 - DNA, 20 bp, Artificial Sequence
  Synthetic
ctgtaggccacctggggtgg

SEQ ID NO: 39834 - DNA, 20 bp, Artificial Sequence
  Synthetic
ttgctgtaggccacctgggg

SEQ ID NO: 39835 - DNA, 20 bp, Artificial Sequence
  Synthetic
accccaggtggcctacagca

SEQ ID NO: 39836 - DNA, 20 bp, Artificial Sequence
  Synthetic
tccttgctgtaggccacctg

SEQ ID NO: 39837 - DNA, 20 bp, Artificial Sequence
  Synthetic
ttccttgctgtaggccacct

SEQ ID NO: 39838 - DNA, 20 bp, Artificial Sequence
  Synthetic
gttccttgctgtaggccacc

SEQ ID NO: 39839 - DNA, 20 bp, Artificial Sequence
  Synthetic
cgggatacgttccttgctgt

SEQ ID NO: 39840 - DNA, 20 bp, Artificial Sequence
  Synthetic
ctacagcaaggaacgtatcc

SEQ ID NO: 39841 - DNA, 20 bp, Artificial Sequence
  Synthetic
tacagcaaggaacgtatccc

SEQ ID NO: 39842 - DNA, 20 bp, Artificial Sequence
  Synthetic
caaggaacgtatcccgggca

SEQ ID NO: 39843 - DNA, 20 bp, Artificial Sequence
  Synthetic
aaggaacgtatcccgggcaa

SEQ ID NO: 39844 - DNA, 20 bp, Artificial Sequence
  Synthetic
taatgaaaacacccttgccc

SEQ ID NO: 39845 - DNA, 20 bp, Artificial Sequence
  Synthetic
ttaatgaaaacacccttgcc

SEQ ID NO: 39846 - DNA, 20 bp, Artificial Sequence
  Synthetic
aagggtgttttcattaacac

SEQ ID NO: 39847 - DNA, 20 bp, Artificial Sequence
  Synthetic
taacacaggccctgaatttc

SEQ ID NO: 39848 - DNA, 20 bp, Artificial Sequence
  Synthetic
acaggccctgaatttctggt

SEQ ID NO: 39849 - DNA, 20 bp, Artificial Sequence
  Synthetic
cacagccaaccagaaattca

SEQ ID NO: 39850 - DNA, 20 bp, Artificial Sequence
  Synthetic
tcacagccaaccagaaattc

SEQ ID NO: 39851 - DNA, 20 bp, Artificial Sequence
  Synthetic
tctggttggctgtgactgca

SEQ ID NO: 39852 - DNA, 20 bp, Artificial Sequence
  Synthetic
gttggctgtgactgcaagga

SEQ ID NO: 39853 - DNA, 20 bp, Artificial Sequence
  Synthetic
ttggctgtgactgcaaggat

SEQ ID NO: 39854 - DNA, 20 bp, Artificial Sequence
  Synthetic
gtgactgcaaggatgggtgt

SEQ ID NO: 39855 - DNA, 20 bp, Artificial Sequence
  Synthetic
tgactgcaaggatgggtgtc

SEQ ID NO: 39856 - DNA, 20 bp, Artificial Sequence
  Synthetic
tagttgatggcaggcacact

SEQ ID NO: 39857 - DNA, 20 bp, Artificial Sequence
  Synthetic
ctggatagttagttgatggc

SEQ ID NO: 39858 - DNA, 20 bp, Artificial Sequence
  Synthetic
ctgccatcaactaactatcc

SEQ ID NO: 39859 - DNA, 20 bp, Artificial Sequence
  Synthetic
tagcctggatagttagttga

SEQ ID NO: 39860 - DNA, 20 bp, Artificial Sequence
  Synthetic
ctggggtacaggctgtagcc

SEQ ID NO: 39861 - DNA, 20 bp, Artificial Sequence
  Synthetic
caggctacagcctgtacccc

SEQ ID NO: 39862 - DNA, 20 bp, Artificial Sequence
  Synthetic
gctacagcctgtaccccagg

SEQ ID NO: 39863 - DNA, 20 bp, Artificial Sequence
  Synthetic
gatttggcctcctggggtac

SEQ ID NO: 39864 - DNA, 20 bp, Artificial Sequence
  Synthetic
agggttgatttggcctcctg

SEQ ID NO: 39865 - DNA, 20 bp, Artificial Sequence
  Synthetic
tagggttgatttggcctcct

SEQ ID NO: 39866 - DNA, 20 bp, Artificial Sequence
  Synthetic
ttagggttgatttggcctcc

SEQ ID NO: 39867 - DNA, 20 bp, Artificial Sequence
  Synthetic
ggccaaatcaaccctaactc

SEQ ID NO: 39868 - DNA, 20 bp, Artificial Sequence
  Synthetic
agccagagttagggttgatt

SEQ ID NO: 39869 - DNA, 20 bp, Artificial Sequence
  Synthetic
tgtactggtagccagagtta

SEQ ID NO: 39870 - DNA, 20 bp, Artificial Sequence
  Synthetic
ttgtactggtagccagagtt

SEQ ID NO: 39871 - DNA, 20 bp, Artificial Sequence
  Synthetic
actcttctagtctcttgtac

SEQ ID NO: 39872 - DNA, 20 bp, Artificial Sequence
  Synthetic
ctagaagagtgtctacccac

SEQ ID NO: 39873 - DNA, 20 bp, Artificial Sequence
  Synthetic
tagaagagtgtctacccaca

SEQ ID NO: 39874 - DNA, 20 bp, Artificial Sequence
  Synthetic
tccttgaccacttaccctgt

SEQ ID NO: 39875 - DNA, 20 bp, Artificial Sequence
  Synthetic
ttccttgaccacttaccctg

SEQ ID NO: 39876 - DNA, 20 bp, Artificial Sequence
  Synthetic
tttgttacactcatataccc

SEQ ID NO: 39877 - DNA, 20 bp, Artificial Sequence
  Synthetic
acccaaacatgtgcacaaac

SEQ ID NO: 39878 - DNA, 20 bp, Artificial Sequence
  Synthetic
accggtttgtgcacatgttt

SEQ ID NO: 39879 - DNA, 20 bp, Artificial Sequence
  Synthetic
aaccggtttgtgcacatgtt

SEQ ID NO: 39880 - DNA, 20 bp, Artificial Sequence
  Synthetic
aaacatgtgcacaaaccggt

SEQ ID NO: 39881 - DNA, 20 bp, Artificial Sequence
  Synthetic
ccagcagagggttcttgccc

SEQ ID NO: 39882 - DNA, 20 bp, Artificial Sequence
  Synthetic
ccggggcaagaaccctctgc

SEQ ID NO: 39883 - DNA, 20 bp, Artificial Sequence
  Synthetic
atagtaacgggaccagcaga

SEQ ID NO: 39884 - DNA, 20 bp, Artificial Sequence
  Synthetic
tatagtaacgggaccagcag

SEQ ID NO: 39885 - DNA, 20 bp, Artificial Sequence
  Synthetic
tcccgttactatatgacttc

SEQ ID NO: 39886 - DNA, 20 bp, Artificial Sequence
  Synthetic
gccggaagtcatatagtaac

SEQ ID NO: 39887 - DNA, 20 bp, Artificial Sequence
  Synthetic
cgccggaagtcatatagtaa

SEQ ID NO: 39888 - DNA, 20 bp, Artificial Sequence
  Synthetic
cgttactatatgacttccgg

SEQ ID NO: 39889 - DNA, 20 bp, Artificial Sequence
  Synthetic
acttccggcggatgacagcc

SEQ ID NO: 39890 - DNA, 20 bp, Artificial Sequence
  Synthetic
gacgccgggctgtcatccgc

SEQ ID NO: 39891 - DNA, 20 bp, Artificial Sequence
  Synthetic
cttgcggttaactcgacgcc

SEQ ID NO: 39892 - DNA, 20 bp, Artificial Sequence
  Synthetic
tcttgcggttaactcgacgc

SEQ ID NO: 39893 - DNA, 20 bp, Artificial Sequence
  Synthetic
gcgtcgagttaaccgcaaga

SEQ ID NO: 39894 - DNA, 20 bp, Artificial Sequence
  Synthetic
cgtcgagttaaccgcaagat

SEQ ID NO: 39895 - DNA, 20 bp, Artificial Sequence
  Synthetic
taacatgaaagcccatcttg

SEQ ID NO: 39896 - DNA, 20 bp, Artificial Sequence
  Synthetic
gttatctataagacaccttg

SEQ ID NO: 39897 - DNA, 20 bp, Artificial Sequence
  Synthetic
caccttgtggtctctgcctt

SEQ ID NO: 39898 - DNA, 20 bp, Artificial Sequence
  Synthetic
gtccgaaggcagagaccaca

SEQ ID NO: 39899 - DNA, 20 bp, Artificial Sequence
  Synthetic
tctctgccttcggacaatgc

SEQ ID NO: 39900 - DNA, 20 bp, Artificial Sequence
  Synthetic
ctatctcctgcattgtccga

SEQ ID NO: 39901 - DNA, 20 bp, Artificial Sequence
  Synthetic
gaacgctaccttttcgagac

SEQ ID NO: 39902 - DNA, 20 bp, Artificial Sequence
  Synthetic
agtcacagccagtctcgaaa

SEQ ID NO: 39903 - DNA, 20 bp, Artificial Sequence
  Synthetic
tggctgtgacttcctcttcc

SEQ ID NO: 39904 - DNA, 20 bp, Artificial Sequence
  Synthetic
aacagaacatctccaggaag

SEQ ID NO: 39905 - DNA, 20 bp, Artificial Sequence
  Synthetic
cttcctggagatgttctgtt

SEQ ID NO: 39906 - DNA, 20 bp, Artificial Sequence
  Synthetic
gatccaaacagaacatctcc

SEQ ID NO: 39907 - DNA, 20 bp, Artificial Sequence
  Synthetic
tttcggtccacaagaacata

SEQ ID NO: 39908 - DNA, 20 bp, Artificial Sequence
  Synthetic
tcaaaactgagcagaaggga

SEQ ID NO: 39909 - DNA, 20 bp, Artificial Sequence
  Synthetic
caaaactgagcagaagggat

SEQ ID NO: 39910 - DNA, 20 bp, Artificial Sequence
  Synthetic
aaaactgagcagaagggatg

SEQ ID NO: 39911 - DNA, 20 bp, Artificial Sequence
  Synthetic
tgtctagatgacattgacag

SEQ ID NO: 39912 - DNA, 20 bp, Artificial Sequence
  Synthetic
gtctagatgacattgacaga

SEQ ID NO: 39913 - DNA, 20 bp, Artificial Sequence
  Synthetic
acatttgtttgcatttattc

SEQ ID NO: 39914 - DNA, 20 bp, Artificial Sequence
  Synthetic
gctaacactgaaaaatctta

SEQ ID NO: 39915 - DNA, 20 bp, Artificial Sequence
  Synthetic
tcttatggtattgatgaaaa

SEQ ID NO: 39916 - DNA, 20 bp, Artificial Sequence
  Synthetic
cttatggtattgatgaaaac

SEQ ID NO: 39917 - DNA, 20 bp, Artificial Sequence
  Synthetic
aaaatatattttcaaaaaag

SEQ ID NO: 39918 - DNA, 20 bp, Artificial Sequence
  Synthetic
gaagttgaagttctcccatt

SEQ ID NO: 39919 - DNA, 20 bp, Artificial Sequence
  Synthetic
tgaagttctcccattaggat

SEQ ID NO: 39920 - DNA, 20 bp, Artificial Sequence
  Synthetic
gatgtgtttccaatcctaat

SEQ ID NO: 39921 - DNA, 20 bp, Artificial Sequence
  Synthetic
ggatgtgtttccaatcctaa

SEQ ID NO: 39922 - DNA, 20 bp, Artificial Sequence
  Synthetic
ttctcagttttagcagttct

SEQ ID NO: 39923 - DNA, 20 bp, Artificial Sequence
  Synthetic
ggattattactgaactttgg

SEQ ID NO: 39924 - DNA, 20 bp, Artificial Sequence
  Synthetic
ttgggattattactgaactt

SEQ ID NO: 39925 - DNA, 20 bp, Artificial Sequence
  Synthetic
aaagttcagtaataatccca

SEQ ID NO: 39926 - DNA, 20 bp, Artificial Sequence
  Synthetic
acttacacagtaagctcctt

SEQ ID NO: 39927 - DNA, 20 bp, Artificial Sequence
  Synthetic
tacttacacagtaagctcct

SEQ ID NO: 39928 - DNA, 20 bp, Artificial Sequence
  Synthetic
aaaatggctgtcttggattc

SEQ ID NO: 39929 - DNA, 20 bp, Artificial Sequence
  Synthetic
gtgttgaaaaatggctgtct

SEQ ID NO: 39930 - DNA, 20 bp, Artificial Sequence
  Synthetic
acagccatttttcaacacaa

SEQ ID NO: 39931 - DNA, 20 bp, Artificial Sequence
  Synthetic
cagccatttttcaacacaat

SEQ ID NO: 39932 - DNA, 20 bp, Artificial Sequence
  Synthetic
tttcccattgtgttgaaaaa

SEQ ID NO: 39933 - DNA, 20 bp, Artificial Sequence
  Synthetic
tcaacacaatgggaaaaaaa

SEQ ID NO: 39934 - DNA, 20 bp, Artificial Sequence
  Synthetic
ttttaaggaatttgtttcct

SEQ ID NO: 39935 - DNA, 20 bp, Artificial Sequence
  Synthetic
ttctggagtgacagactccg

SEQ ID NO: 39936 - DNA, 20 bp, Artificial Sequence
  Synthetic
gtcactccagaagataatga

SEQ ID NO: 39937 - DNA, 20 bp, Artificial Sequence
  Synthetic
ttaaatccatcattatcttc

SEQ ID NO: 39938 - DNA, 20 bp, Artificial Sequence
  Synthetic
gagttcagatgctctcgggg

SEQ ID NO: 39939 - DNA, 20 bp, Artificial Sequence
  Synthetic
ttagagttcagatgctctcg

SEQ ID NO: 39940 - DNA, 20 bp, Artificial Sequence
  Synthetic
tttagagttcagatgctctc

SEQ ID NO: 39941 - DNA, 20 bp, Artificial Sequence
  Synthetic
ttttagagttcagatgctct

SEQ ID NO: 39942 - DNA, 20 bp, Artificial Sequence
  Synthetic
gcatctgaactctaaaacca

SEQ ID NO: 39943 - DNA, 20 bp, Artificial Sequence
  Synthetic
catctgaactctaaaaccaa

SEQ ID NO: 39944 - DNA, 20 bp, Artificial Sequence
  Synthetic
aaaccaagggagcacaaagt

SEQ ID NO: 39945 - DNA, 20 bp, Artificial Sequence
  Synthetic
aagcctactttgtgctccct

SEQ ID NO: 39946 - DNA, 20 bp, Artificial Sequence
  Synthetic
tatcttcaaactcatcaaca

SEQ ID NO: 39947 - DNA, 20 bp, Artificial Sequence
  Synthetic
atagagaagaaactccacca

SEQ ID NO: 39948 - DNA, 20 bp, Artificial Sequence
  Synthetic
tggttacatctgctccttgg

SEQ ID NO: 39949 - DNA, 20 bp, Artificial Sequence
  Synthetic
accaaggagcagatgtaacc

SEQ ID NO: 39950 - DNA, 20 bp, Artificial Sequence
  Synthetic
gcctggttacatctgctcct

SEQ ID NO: 39951 - DNA, 20 bp, Artificial Sequence
  Synthetic
atgtaaccaggcgaccacat

SEQ ID NO: 39952 - DNA, 20 bp, Artificial Sequence
  Synthetic
gattatccaatgtggtcgcc

SEQ ID NO: 39953 - DNA, 20 bp, Artificial Sequence
  Synthetic
aatattctgattatccaatg

SEQ ID NO: 39954 - DNA, 20 bp, Artificial Sequence
  Synthetic
ggataatcagaatattaaaa

SEQ ID NO: 39955 - DNA, 20 bp, Artificial Sequence
  Synthetic
gaatattaaaaaggcaattg

SEQ ID NO: 39956 - DNA, 20 bp, Artificial Sequence
  Synthetic
tcaaattcagaaaccccaag

SEQ ID NO: 39957 - DNA, 20 bp, Artificial Sequence
  Synthetic
caaattcagaaaccccaaga

SEQ ID NO: 39958 - DNA, 20 bp, Artificial Sequence
  Synthetic
gctgtagatcgtccctcttg

SEQ ID NO: 39959 - DNA, 20 bp, Artificial Sequence
  Synthetic
tgctgtagatcgtccctctt

SEQ ID NO: 39960 - DNA, 20 bp, Artificial Sequence
  Synthetic
atgctgtagatcgtccctct

SEQ ID NO: 39961 - DNA, 20 bp, Artificial Sequence
  Synthetic
tacagcatgtcaaagacagc

SEQ ID NO: 39962 - DNA, 20 bp, Artificial Sequence
  Synthetic
agaatcagatgaagtattct

SEQ ID NO: 39963 - DNA, 20 bp, Artificial Sequence
  Synthetic
tctctaacaaagttcaataa

SEQ ID NO: 39964 - DNA, 20 bp, Artificial Sequence
  Synthetic
ctctaacaaagttcaataaa

SEQ ID NO: 39965 - DNA, 20 bp, Artificial Sequence
  Synthetic
taaagggaatgtgtttttat

SEQ ID NO: 39966 - DNA, 20 bp, Artificial Sequence
  Synthetic
ttattggatgccacaaaaga

SEQ ID NO: 39967 - DNA, 20 bp, Artificial Sequence
  Synthetic
gccacaaaagaaggaaatgt

SEQ ID NO: 39968 - DNA, 20 bp, Artificial Sequence
  Synthetic
gccgacatttccttcttttg

SEQ ID NO: 39969 - DNA, 20 bp, Artificial Sequence
  Synthetic
ttatactcacattaaggaag

SEQ ID NO: 39970 - DNA, 20 bp, Artificial Sequence
  Synthetic
cagcccttatactcacatta

SEQ ID NO: 39971 - DNA, 20 bp, Artificial Sequence
  Synthetic
tagttgttgcccaaatctct

SEQ ID NO: 39972 - DNA, 20 bp, Artificial Sequence
  Synthetic
cattctgtaccaagagattt

SEQ ID NO: 39973 - DNA, 20 bp, Artificial Sequence
  Synthetic
acattctgtaccaagagatt

SEQ ID NO: 39974 - DNA, 20 bp, Artificial Sequence
  Synthetic
tttttgtagaaacacacaac

SEQ ID NO: 39975 - DNA, 20 bp, Artificial Sequence
  Synthetic
acacaacaggaattttccat

SEQ ID NO: 39976 - DNA, 20 bp, Artificial Sequence
  Synthetic
caacaggaattttccattgg

SEQ ID NO: 39977 - DNA, 20 bp, Artificial Sequence
  Synthetic
ttggtgaagaatgccaccaa

SEQ ID NO: 39978 - DNA, 20 bp, Artificial Sequence
  Synthetic
tggtggcattcttcaccaac

SEQ ID NO: 39979 - DNA, 20 bp, Artificial Sequence
  Synthetic
gaaatcaatttcaaacctgt

SEQ ID NO: 39980 - DNA, 20 bp, Artificial Sequence
  Synthetic
aagcaagaacagagctaaca

SEQ ID NO: 39981 - DNA, 20 bp, Artificial Sequence
  Synthetic
agcaagaacagagctaacat

SEQ ID NO: 39982 - DNA, 20 bp, Artificial Sequence
  Synthetic
acagagctaacatgggatta

SEQ ID NO: 39983 - DNA, 20 bp, Artificial Sequence
  Synthetic
tctgatgtggatattagcaa

SEQ ID NO: 39984 - DNA, 20 bp, Artificial Sequence
  Synthetic
tgtggatattagcaatggag

SEQ ID NO: 39985 - DNA, 20 bp, Artificial Sequence
  Synthetic
atttcattacagaaagaaat

SEQ ID NO: 39986 - DNA, 20 bp, Artificial Sequence
  Synthetic
aatttcattacagaaagaaa

SEQ ID NO: 39987 - DNA, 20 bp, Artificial Sequence
  Synthetic
tctttctgtacttaaactgt

SEQ ID NO: 39988 - DNA, 20 bp, Artificial Sequence
  Synthetic
gtctttctgtacttaaactg

SEQ ID NO: 39989 - DNA, 20 bp, Artificial Sequence
  Synthetic
ttaagtacagaaagactgtg

SEQ ID NO: 39990 - DNA, 20 bp, Artificial Sequence
  Synthetic
ttggttagattatatgctcg

SEQ ID NO: 39991 - DNA, 20 bp, Artificial Sequence
  Synthetic
agtaaacatgctggaaaagt

SEQ ID NO: 39992 - DNA, 20 bp, Artificial Sequence
  Synthetic
acaggaatcagtaaacatgc

SEQ ID NO: 39993 - DNA, 20 bp, Artificial Sequence
  Synthetic
tgattcctgtgactgctctg

SEQ ID NO: 39994 - DNA, 20 bp, Artificial Sequence
  Synthetic
gattcctgtgactgctctga

SEQ ID NO: 39995 - DNA, 20 bp, Artificial Sequence
  Synthetic
gcagccctcagagcagtcac

SEQ ID NO: 39996 - DNA, 20 bp, Artificial Sequence
  Synthetic
catgtcttcaactgacagca

SEQ ID NO: 39997 - DNA, 20 bp, Artificial Sequence
  Synthetic
acttgacaagggggaagttt

SEQ ID NO: 39998 - DNA, 20 bp, Artificial Sequence
  Synthetic
tattttgtcacttgacaagg

SEQ ID NO: 39999 - DNA, 20 bp, Artificial Sequence
  Synthetic
ttattttgtcacttgacaag

SEQ ID NO: 40000 - DNA, 20 bp, Artificial Sequence
  Synthetic
gttattttgtcacttgacaa

SEQ ID NO: 40001 - DNA, 20 bp, Artificial Sequence
  Synthetic
ggttattttgtcacttgaca

SEQ ID NO: 40002 - DNA, 20 bp, Artificial Sequence
  Synthetic
tcaagtgacaaaataaccac

SEQ ID NO: 40003 - DNA, 20 bp, Artificial Sequence
  Synthetic
tcttttatatttatatccag

SEQ ID NO: 40004 - DNA, 20 bp, Artificial Sequence
  Synthetic
ctacagagacagattcctac

SEQ ID NO: 40005 - DNA, 20 bp, Artificial Sequence
  Synthetic
tacagagacagattcctact

SEQ ID NO: 40006 - DNA, 20 bp, Artificial Sequence
  Synthetic
ctcaaggtaccttacccagt

SEQ ID NO: 40007 - DNA, 20 bp, Artificial Sequence
  Synthetic
gtcgattacatttgcacaaa

SEQ ID NO: 40008 - DNA, 20 bp, Artificial Sequence
  Synthetic
atttgattggcagctgcaga

SEQ ID NO: 40009 - DNA, 20 bp, Artificial Sequence
  Synthetic
catttgattggcagctgcag

SEQ ID NO: 40010 - DNA, 20 bp, Artificial Sequence
  Synthetic
ctttggaagtgacatttgat

SEQ ID NO: 40011 - DNA, 20 bp, Artificial Sequence
  Synthetic
ttgtctttgcatgtcgtctt

SEQ ID NO: 40012 - DNA, 20 bp, Artificial Sequence
  Synthetic
aaggggttttataactcacg

SEQ ID NO: 40013 - DNA, 20 bp, Artificial Sequence
  Synthetic
gtgagttataaaaccccttg

SEQ ID NO: 40014 - DNA, 20 bp, Artificial Sequence
  Synthetic
gttataaaaccccttgtgga

SEQ ID NO: 40015 - DNA, 20 bp, Artificial Sequence
  Synthetic
tcgtagactccttccacaag

SEQ ID NO: 40016 - DNA, 20 bp, Artificial Sequence
  Synthetic
ttcgtagactccttccacaa

SEQ ID NO: 40017 - DNA, 20 bp, Artificial Sequence
  Synthetic
tttcgtagactccttccaca

SEQ ID NO: 40018 - DNA, 20 bp, Artificial Sequence
  Synthetic
tggaaggagtctacgaaacg

SEQ ID NO: 40019 - DNA, 20 bp, Artificial Sequence
  Synthetic
aaggagtctacgaaacgtgg

SEQ ID NO: 40020 - DNA, 20 bp, Artificial Sequence
  Synthetic
agttacactctgtctcaagc

SEQ ID NO: 40021 - DNA, 20 bp, Artificial Sequence
  Synthetic
attccgagccaactgaacat

SEQ ID NO: 40022 - DNA, 20 bp, Artificial Sequence
  Synthetic
tcaagacgcataaaaaaggc

SEQ ID NO: 40023 - DNA, 20 bp, Artificial Sequence
  Synthetic
caagacgcataaaaaaggct

SEQ ID NO: 40024 - DNA, 20 bp, Artificial Sequence
  Synthetic
aagacgcataaaaaaggctg

SEQ ID NO: 40025 - DNA, 20 bp, Artificial Sequence
  Synthetic
aggctggggacttcgtacct

SEQ ID NO: 40026 - DNA, 20 bp, Artificial Sequence
  Synthetic
accttggaatttataccgaa

SEQ ID NO: 40027 - DNA, 20 bp, Artificial Sequence
  Synthetic
tcctttcggtataaattcca

SEQ ID NO: 40028 - DNA, 20 bp, Artificial Sequence
  Synthetic
tggaatttataccgaaagga

SEQ ID NO: 40029 - DNA, 20 bp, Artificial Sequence
  Synthetic
tcacagacaaaccttccttt

SEQ ID NO: 40030 - DNA, 20 bp, Artificial Sequence
  Synthetic
aggtttgtctgtgaatatgc

SEQ ID NO: 40031 - DNA, 20 bp, Artificial Sequence
  Synthetic
tgtctgtgaatatgctggtg

SEQ ID NO: 40032 - DNA, 20 bp, Artificial Sequence
  Synthetic
gaatatgctggtgaggtttt

SEQ ID NO: 40033 - DNA, 20 bp, Artificial Sequence
  Synthetic
ggctataatgtaattggagt

SEQ ID NO: 40034 - DNA, 20 bp, Artificial Sequence
  Synthetic
cctgatggctataatgtaat

SEQ ID NO: 40035 - DNA, 20 bp, Artificial Sequence
  Synthetic
ccaattacattatagccatc

SEQ ID NO: 40036 - DNA, 20 bp, Artificial Sequence
  Synthetic
caattacattatagccatca

SEQ ID NO: 40037 - DNA, 20 bp, Artificial Sequence
  Synthetic
attataaacatgttccctga

SEQ ID NO: 40038 - DNA, 20 bp, Artificial Sequence
  Synthetic
atcagggaacatgtttataa

SEQ ID NO: 40039 - DNA, 20 bp, Artificial Sequence
  Synthetic
tcagggaacatgtttataat

SEQ ID NO: 40040 - DNA, 20 bp, Artificial Sequence
  Synthetic
ggaacatgtttataatgggc

SEQ ID NO: 40041 - DNA, 20 bp, Artificial Sequence
  Synthetic
tgtttataatgggcaggtaa

SEQ ID NO: 40042 - DNA, 20 bp, Artificial Sequence
  Synthetic
tttgttgaccctacttatat

SEQ ID NO: 40043 - DNA, 20 bp, Artificial Sequence
  Synthetic
caatatttcctatataagta

SEQ ID NO: 40044 - DNA, 20 bp, Artificial Sequence
  Synthetic
ccaatatttcctatataagt

SEQ ID NO: 40045 - DNA, 20 bp, Artificial Sequence
  Synthetic
cctacttatataggaaatat

SEQ ID NO: 40046 - DNA, 20 bp, Artificial Sequence
  Synthetic
ttggctcacaagaatgatta

SEQ ID NO: 40047 - DNA, 20 bp, Artificial Sequence
  Synthetic
acaggaatcatcaaaaggtt

SEQ ID NO: 40048 - DNA, 20 bp, Artificial Sequence
  Synthetic
ttcggacaggaatcatcaaa

SEQ ID NO: 40049 - DNA, 20 bp, Artificial Sequence
  Synthetic
tcctgtccgaattgactcaa

SEQ ID NO: 40050 - DNA, 20 bp, Artificial Sequence
  Synthetic
accattgagtcaattcggac

SEQ ID NO: 40051 - DNA, 20 bp, Artificial Sequence
  Synthetic
taggtaccattgagtcaatt

SEQ ID NO: 40052 - DNA, 20 bp, Artificial Sequence
  Synthetic
tgactcaatggtacctaagt

SEQ ID NO: 40053 - DNA, 20 bp, Artificial Sequence
  Synthetic
gctgcaaaaagtgccaactt

SEQ ID NO: 40054 - DNA, 20 bp, Artificial Sequence
  Synthetic
ttcttctggcacaatatctt

SEQ ID NO: 40055 - DNA, 20 bp, Artificial Sequence
  Synthetic
tcataagagagttcttcttc

SEQ ID NO: 40056 - DNA, 20 bp, Artificial Sequence
  Synthetic
gaactctcttatgattattc

SEQ ID NO: 40057 - DNA, 20 bp, Artificial Sequence
  Synthetic
ggccgcgccggcgcccttcc

SEQ ID NO: 40058 - DNA, 20 bp, Artificial Sequence
  Synthetic
tacctggaagggcgccggcg

SEQ ID NO: 40059 - DNA, 20 bp, Artificial Sequence
  Synthetic
gcgccggcgcccttccaggt

SEQ ID NO: 40060 - DNA, 20 bp, Artificial Sequence
  Synthetic
gcccctacctggaagggcgc

SEQ ID NO: 40061 - DNA, 20 bp, Artificial Sequence
  Synthetic
ggccccgcccctacctggaa

SEQ ID NO: 40062 - DNA, 20 bp, Artificial Sequence
  Synthetic
tggccccgcccctacctgga

SEQ ID NO: 40063 - DNA, 20 bp, Artificial Sequence
  Synthetic
tacactcctgatcatgtagt

SEQ ID NO: 40064 - DNA, 20 bp, Artificial Sequence
  Synthetic
ccaggtccaactacatgatc

SEQ ID NO: 40065 - DNA, 20 bp, Artificial Sequence
  Synthetic
cctgatcatgtagttggacc

SEQ ID NO: 40066 - DNA, 20 bp, Artificial Sequence
  Synthetic
gtgggatcaatgtctgctcc

SEQ ID NO: 40067 - DNA, 20 bp, Artificial Sequence
  Synthetic
ccgggaaaggttatttgagt

SEQ ID NO: 40068 - DNA, 20 bp, Artificial Sequence
  Synthetic
cccactcaaataacctttcc

SEQ ID NO: 40069 - DNA, 20 bp, Artificial Sequence
  Synthetic
tccgggaaaggttatttgag

SEQ ID NO: 40070 - DNA, 20 bp, Artificial Sequence
  Synthetic
gacacaaatgcatccgggaa

SEQ ID NO: 40071 - DNA, 20 bp, Artificial Sequence
  Synthetic
gttttgacacaaatgcatcc

SEQ ID NO: 40072 - DNA, 20 bp, Artificial Sequence
  Synthetic
agttttgacacaaatgcatc

SEQ ID NO: 40073 - DNA, 20 bp, Artificial Sequence
  Synthetic
gtcaaaactccctgcctccc

SEQ ID NO: 40074 - DNA, 20 bp, Artificial Sequence
  Synthetic
gagcaagtgccagggaggca

SEQ ID NO: 40075 - DNA, 20 bp, Artificial Sequence
  Synthetic
ggagcaagtgccagggaggc

SEQ ID NO: 40076 - DNA, 20 bp, Artificial Sequence
  Synthetic
gacaggagcaagtgccaggg

SEQ ID NO: 40077 - DNA, 20 bp, Artificial Sequence
  Synthetic
ggagacaggagcaagtgcca

SEQ ID NO: 40078 - DNA, 20 bp, Artificial Sequence
  Synthetic
cggagacaggagcaagtgcc

SEQ ID NO: 40079 - DNA, 20 bp, Artificial Sequence
  Synthetic
acttgctcctgtctccgcca

SEQ ID NO: 40080 - DNA, 20 bp, Artificial Sequence
  Synthetic
gttctctccatggcggagac

SEQ ID NO: 40081 - DNA, 20 bp, Artificial Sequence
  Synthetic
catcatagttctctccatgg

SEQ ID NO: 40082 - DNA, 20 bp, Artificial Sequence
  Synthetic
tatcatcatagttctctcca

SEQ ID NO: 40083 - DNA, 20 bp, Artificial Sequence
  Synthetic
aactcatgccttagagatat

SEQ ID NO: 40084 - DNA, 20 bp, Artificial Sequence
  Synthetic
tgccttagagatataggatc

SEQ ID NO: 40085 - DNA, 20 bp, Artificial Sequence
  Synthetic
ctccagatcctatatctcta

SEQ ID NO: 40086 - DNA, 20 bp, Artificial Sequence
  Synthetic
cttagagatataggatctgg

SEQ ID NO: 40087 - DNA, 20 bp, Artificial Sequence
  Synthetic
aggacattgcattcaaaaac

SEQ ID NO: 40088 - DNA, 20 bp, Artificial Sequence
  Synthetic
agtggtcactgcatcggcac

SEQ ID NO: 40089 - DNA, 20 bp, Artificial Sequence
  Synthetic
ttctgcagtggtcactgcat

SEQ ID NO: 40090 - DNA, 20 bp, Artificial Sequence
  Synthetic
tgaccactgcagaaacagag

SEQ ID NO: 40091 - DNA, 20 bp, Artificial Sequence
  Synthetic
ggaccactctgtttctgcag

SEQ ID NO: 40092 - DNA, 20 bp, Artificial Sequence
  Synthetic
gttgagaccctaccaaagag

SEQ ID NO: 40093 - DNA, 20 bp, Artificial Sequence
  Synthetic
ttgacagcctctctttggta

SEQ ID NO: 40094 - DNA, 20 bp, Artificial Sequence
  Synthetic
attgacagcctctctttggt

SEQ ID NO: 40095 - DNA, 20 bp, Artificial Sequence
  Synthetic
accaaagagaggctgtcaat

SEQ ID NO: 40096 - DNA, 20 bp, Artificial Sequence
  Synthetic
tccaattgacagcctctctt

SEQ ID NO: 40097 - DNA, 20 bp, Artificial Sequence
  Synthetic
ttcagaagcagtcctgctac

SEQ ID NO: 40098 - DNA, 20 bp, Artificial Sequence
  Synthetic
atcttattcttaccagtagc

SEQ ID NO: 40099 - DNA, 20 bp, Artificial Sequence
  Synthetic
aaagtgccctgcacttctta

SEQ ID NO: 40100 - DNA, 20 bp, Artificial Sequence
  Synthetic
ctctcgccataagaagtgca

SEQ ID NO: 40101 - DNA, 20 bp, Artificial Sequence
  Synthetic
tctctcgccataagaagtgc

SEQ ID NO: 40102 - DNA, 20 bp, Artificial Sequence
  Synthetic
gcgagagattgttacatctg

SEQ ID NO: 40103 - DNA, 20 bp, Artificial Sequence
  Synthetic
cgagagattgttacatctga

SEQ ID NO: 40104 - DNA, 20 bp, Artificial Sequence
  Synthetic
ctctactataatccatatac

SEQ ID NO: 40105 - DNA, 20 bp, Artificial Sequence
  Synthetic
actataatccatatacaggc

SEQ ID NO: 40106 - DNA, 20 bp, Artificial Sequence
  Synthetic
ttgccttaccagcctgtata

SEQ ID NO: 40107 - DNA, 20 bp, Artificial Sequence
  Synthetic
attcgtgagtacccaaattc

SEQ ID NO: 40108 - DNA, 20 bp, Artificial Sequence
  Synthetic
ttcgtgagtacccaaattct

SEQ ID NO: 40109 - DNA, 20 bp, Artificial Sequence
  Synthetic
gcaactgcggcccagaattt

SEQ ID NO: 40110 - DNA, 20 bp, Artificial Sequence
  Synthetic
agcaactgcggcccagaatt

SEQ ID NO: 40111 - DNA, 20 bp, Artificial Sequence
  Synthetic
aattctgggccgcagttgct

SEQ ID NO: 40112 - DNA, 20 bp, Artificial Sequence
  Synthetic
tctgggccgcagttgcttgg

SEQ ID NO: 40113 - DNA, 20 bp, Artificial Sequence
  Synthetic
aaaattccaccaagcaactg

SEQ ID NO: 40114 - DNA, 20 bp, Artificial Sequence
  Synthetic
tggaattttagcagatgaga

SEQ ID NO: 40115 - DNA, 20 bp, Artificial Sequence
  Synthetic
ggaattttagcagatgagat

SEQ ID NO: 40116 - DNA, 20 bp, Artificial Sequence
  Synthetic
ttagcagatgagatgggtct

SEQ ID NO: 40117 - DNA, 20 bp, Artificial Sequence
  Synthetic
gatgggtcttggaaagacag

SEQ ID NO: 40118 - DNA, 20 bp, Artificial Sequence
  Synthetic
gggtcttggaaagacagtgg

SEQ ID NO: 40119 - DNA, 20 bp, Artificial Sequence
  Synthetic
tggaaagacagtggaggttt

SEQ ID NO: 40120 - DNA, 20 bp, Artificial Sequence
  Synthetic
agatgctctcactcttcccg

SEQ ID NO: 40121 - DNA, 20 bp, Artificial Sequence
  Synthetic
gctctcactcttcccgaggt

SEQ ID NO: 40122 - DNA, 20 bp, Artificial Sequence
  Synthetic
ctactataccctcctacctc

SEQ ID NO: 40123 - DNA, 20 bp, Artificial Sequence
  Synthetic
ttgtttgtatcagggaaaag

SEQ ID NO: 40124 - DNA, 20 bp, Artificial Sequence
  Synthetic
tttattccgtcacattattt

SEQ ID NO: 40125 - DNA, 20 bp, Artificial Sequence
  Synthetic
attccgtcacattattttgg

SEQ ID NO: 40126 - DNA, 20 bp, Artificial Sequence
  Synthetic
tttcctccaaaataatgtga

SEQ ID NO: 40127 - DNA, 20 bp, Artificial Sequence
  Synthetic
ttggttcaaattcgatattc

SEQ ID NO: 40128 - DNA, 20 bp, Artificial Sequence
  Synthetic
gggcattgaactttttcttt

SEQ ID NO: 40129 - DNA, 20 bp, Artificial Sequence
  Synthetic
acagctgtgaaagaaatgaa

SEQ ID NO: 40130 - DNA, 20 bp, Artificial Sequence
  Synthetic
aaagaaatgaatggaaaaaa

SEQ ID NO: 40131 - DNA, 20 bp, Artificial Sequence
  Synthetic
atacttatagatggaaagga

SEQ ID NO: 40132 - DNA, 20 bp, Artificial Sequence
  Synthetic
tgacatacttatagatggaa

SEQ ID NO: 40133 - DNA, 20 bp, Artificial Sequence
  Synthetic
agaactgacatacttataga

SEQ ID NO: 40134 - DNA, 20 bp, Artificial Sequence
  Synthetic
tatatagatacgatgttcaa

SEQ ID NO: 40135 - DNA, 20 bp, Artificial Sequence
  Synthetic
gatacgatgttcaacggaac

SEQ ID NO: 40136 - DNA, 20 bp, Artificial Sequence
  Synthetic
ggaacaggagtcttttgaaa

SEQ ID NO: 40137 - DNA, 20 bp, Artificial Sequence
  Synthetic
ctgaaatgtttaatttttga

SEQ ID NO: 40138 - DNA, 20 bp, Artificial Sequence
  Synthetic
ggtctcgtgaaacagatcaa

SEQ ID NO: 40139 - DNA, 20 bp, Artificial Sequence
  Synthetic
gtgaaacagatcaaaggcca

SEQ ID NO: 40140 - DNA, 20 bp, Artificial Sequence
  Synthetic
atcaaaggccatggtttttc

SEQ ID NO: 40141 - DNA, 20 bp, Artificial Sequence
  Synthetic
tcaaaggccatggtttttct

SEQ ID NO: 40142 - DNA, 20 bp, Artificial Sequence
  Synthetic
taaaagtcccagaaaaacca

SEQ ID NO: 40143 - DNA, 20 bp, Artificial Sequence
  Synthetic
tttttctgggacttttacat

SEQ ID NO: 40144 - DNA, 20 bp, Artificial Sequence
  Synthetic
ttttctgggacttttacatt

SEQ ID NO: 40145 - DNA, 20 bp, Artificial Sequence
  Synthetic
tacattgggaaagaattaca

SEQ ID NO: 40146 - DNA, 20 bp, Artificial Sequence
  Synthetic
gggaaagaattacaaggaag

SEQ ID NO: 40147 - DNA, 20 bp, Artificial Sequence
  Synthetic
atgtgataaaacaaaaaagc

SEQ ID NO: 40148 - DNA, 20 bp, Artificial Sequence
  Synthetic
atatttttttcataggcagt

SEQ ID NO: 40149 - DNA, 20 bp, Artificial Sequence
  Synthetic
tatttttttcataggcagta

SEQ ID NO: 40150 - DNA, 20 bp, Artificial Sequence
  Synthetic
cataggcagtagggagtcca

SEQ ID NO: 40151 - DNA, 20 bp, Artificial Sequence
  Synthetic
gtttctttctgaattttcct

SEQ ID NO: 40152 - DNA, 20 bp, Artificial Sequence
  Synthetic
cagaaagaaactagaaaatc

SEQ ID NO: 40153 - DNA, 20 bp, Artificial Sequence
  Synthetic
agaaagaaactagaaaatca

SEQ ID NO: 40154 - DNA, 20 bp, Artificial Sequence
  Synthetic
aactagaaaatcagggaaca

SEQ ID NO: 40155 - DNA, 20 bp, Artificial Sequence
  Synthetic
tcatcatcagaggtgtctga

SEQ ID NO: 40156 - DNA, 20 bp, Artificial Sequence
  Synthetic
aggatcatcatcatcatcag

SEQ ID NO: 40157 - DNA, 20 bp, Artificial Sequence
  Synthetic
gacttataataataatagta

SEQ ID NO: 40158 - DNA, 20 bp, Artificial Sequence
  Synthetic
actattattattataagtcc

SEQ ID NO: 40159 - DNA, 20 bp, Artificial Sequence
  Synthetic
caatttactgcgatttctcc

SEQ ID NO: 40160 - DNA, 20 bp, Artificial Sequence
  Synthetic
ggagaaatcgcagtaaattg

SEQ ID NO: 40161 - DNA, 20 bp, Artificial Sequence
  Synthetic
cttgttccatccacaaaaaa

SEQ ID NO: 40162 - DNA, 20 bp, Artificial Sequence
  Synthetic
ctttttcctttttttgtgga

SEQ ID NO: 40163 - DNA, 20 bp, Artificial Sequence
  Synthetic
ttgactttttcctttttttg

SEQ ID NO: 40164 - DNA, 20 bp, Artificial Sequence
  Synthetic
tgtgaatcgggattgataaa

SEQ ID NO: 40165 - DNA, 20 bp, Artificial Sequence
  Synthetic
tttatcaatcccgattcaca

SEQ ID NO: 40166 - DNA, 20 bp, Artificial Sequence
  Synthetic
ggacagtgaccttgtgaatc

SEQ ID NO: 40167 - DNA, 20 bp, Artificial Sequence
  Synthetic
tggacagtgaccttgtgaat

SEQ ID NO: 40168 - DNA, 20 bp, Artificial Sequence
  Synthetic
tgtccagctactagcgactc

SEQ ID NO: 40169 - DNA, 20 bp, Artificial Sequence
  Synthetic
attccagagtcgctagtagc

SEQ ID NO: 40170 - DNA, 20 bp, Artificial Sequence
  Synthetic
caaccaagaacatgaaacag

SEQ ID NO: 40171 - DNA, 20 bp, Artificial Sequence
  Synthetic
agtcctctgtttcatgttct

SEQ ID NO: 40172 - DNA, 20 bp, Artificial Sequence
  Synthetic
ggactcatggtattagaagg

SEQ ID NO: 40173 - DNA, 20 bp, Artificial Sequence
  Synthetic
aagggactcatggtattaga

SEQ ID NO: 40174 - DNA, 20 bp, Artificial Sequence
  Synthetic
agaggtgttaaagggactca

SEQ ID NO: 40175 - DNA, 20 bp, Artificial Sequence
  Synthetic
cggtaatcagaggtgttaaa

SEQ ID NO: 40176 - DNA, 20 bp, Artificial Sequence
  Synthetic
gcggtaatcagaggtgttaa

SEQ ID NO: 40177 - DNA, 20 bp, Artificial Sequence
  Synthetic
acactcaaagcggtaatcag

SEQ ID NO: 40178 - DNA, 20 bp, Artificial Sequence
  Synthetic
taccgctttgagtgtatatg

SEQ ID NO: 40179 - DNA, 20 bp, Artificial Sequence
  Synthetic
caccacatatacactcaaag

SEQ ID NO: 40180 - DNA, 20 bp, Artificial Sequence
  Synthetic
cacttcaggcattgaacacg

SEQ ID NO: 40181 - DNA, 20 bp, Artificial Sequence
  Synthetic
aatgcctgaagtgtcacctg

SEQ ID NO: 40182 - DNA, 20 bp, Artificial Sequence
  Synthetic
gttgccacaggtgacacttc

SEQ ID NO: 40183 - DNA, 20 bp, Artificial Sequence
  Synthetic
cacactttgcatgttgccac

SEQ ID NO: 40184 - DNA, 20 bp, Artificial Sequence
  Synthetic
aggcagtgggggcagtaaaa

SEQ ID NO: 40185 - DNA, 20 bp, Artificial Sequence
  Synthetic
ccattgcaacaaggcagtgg

SEQ ID NO: 40186 - DNA, 20 bp, Artificial Sequence
  Synthetic
cccccactgccttgttgcaa

SEQ ID NO: 40187 - DNA, 20 bp, Artificial Sequence
  Synthetic
tccattgcaacaaggcagtg

SEQ ID NO: 40188 - DNA, 20 bp, Artificial Sequence
  Synthetic
ttccattgcaacaaggcagt

SEQ ID NO: 40189 - DNA, 20 bp, Artificial Sequence
  Synthetic
gttccattgcaacaaggcag

SEQ ID NO: 40190 - DNA, 20 bp, Artificial Sequence
  Synthetic
acactggttccattgcaaca

SEQ ID NO: 40191 - DNA, 20 bp, Artificial Sequence
  Synthetic
agagttgctcttgttgacac

SEQ ID NO: 40192 - DNA, 20 bp, Artificial Sequence
  Synthetic
cactggtgacagatggaact

SEQ ID NO: 40193 - DNA, 20 bp, Artificial Sequence
  Synthetic
caagttccatctgtcaccag

SEQ ID NO: 40194 - DNA, 20 bp, Artificial Sequence
  Synthetic
aagttccatctgtcaccagt

SEQ ID NO: 40195 - DNA, 20 bp, Artificial Sequence
  Synthetic
ttccatctgtcaccagtggg

SEQ ID NO: 40196 - DNA, 20 bp, Artificial Sequence
  Synthetic
atccacccactggtgacaga

SEQ ID NO: 40197 - DNA, 20 bp, Artificial Sequence
  Synthetic
tgttgatctcatccacccac

SEQ ID NO: 40198 - DNA, 20 bp, Artificial Sequence
  Synthetic
agtgggtggatgagatcaac

SEQ ID NO: 40199 - DNA, 20 bp, Artificial Sequence
  Synthetic
atgagatcaacaggcatgtg

SEQ ID NO: 40200 - DNA, 20 bp, Artificial Sequence
  Synthetic
gtcgtcatctcttcgagtct

SEQ ID NO: 40201 - DNA, 20 bp, Artificial Sequence
  Synthetic
attatttcctaggtatatca

SEQ ID NO: 40202 - DNA, 20 bp, Artificial Sequence
  Synthetic
tatcaaggagtgaagaaaga

SEQ ID NO: 40203 - DNA, 20 bp, Artificial Sequence
  Synthetic
ctttttacaacctcattttt

SEQ ID NO: 40204 - DNA, 20 bp, Artificial Sequence
  Synthetic
acctcattttttggcagaac

SEQ ID NO: 40205 - DNA, 20 bp, Artificial Sequence
  Synthetic
tcctgttctgccaaaaaatg

SEQ ID NO: 40206 - DNA, 20 bp, Artificial Sequence
  Synthetic
ttctgaacgcagtacatcat

SEQ ID NO: 40207 - DNA, 20 bp, Artificial Sequence
  Synthetic
tatcccacatagcaatagtg

SEQ ID NO: 40208 - DNA, 20 bp, Artificial Sequence
  Synthetic
catcctcactattgctatgt

SEQ ID NO: 40209 - DNA, 20 bp, Artificial Sequence
  Synthetic
ccatcctcactattgctatg

SEQ ID NO: 40210 - DNA, 20 bp, Artificial Sequence
  Synthetic
ccacatagcaatagtgagga

SEQ ID NO: 40211 - DNA, 20 bp, Artificial Sequence
  Synthetic
cacatagcaatagtgaggat

SEQ ID NO: 40212 - DNA, 20 bp, Artificial Sequence
  Synthetic
gtgaggatgggcgtcgccta

SEQ ID NO: 40213 - DNA, 20 bp, Artificial Sequence
  Synthetic
tatagcgcttctggttccgt

SEQ ID NO: 40214 - DNA, 20 bp, Artificial Sequence
  Synthetic
acggaaccagaagcgctata

SEQ ID NO: 40215 - DNA, 20 bp, Artificial Sequence
  Synthetic
ggatagccatatagcgcttc

SEQ ID NO: 40216 - DNA, 20 bp, Artificial Sequence
  Synthetic
tatggctatcccgagccccc

SEQ ID NO: 40217 - DNA, 20 bp, Artificial Sequence
  Synthetic
ccacagctaccagggggctc

SEQ ID NO: 40218 - DNA, 20 bp, Artificial Sequence
  Synthetic
cccgagccccctggtagctg

SEQ ID NO: 40219 - DNA, 20 bp, Artificial Sequence
  Synthetic
tccacagctaccagggggct

SEQ ID NO: 40220 - DNA, 20 bp, Artificial Sequence
  Synthetic
gccccctggtagctgtggag

SEQ ID NO: 40221 - DNA, 20 bp, Artificial Sequence
  Synthetic
accactccacagctaccagg

SEQ ID NO: 40222 - DNA, 20 bp, Artificial Sequence
  Synthetic
caccactccacagctaccag

SEQ ID NO: 40223 - DNA, 20 bp, Artificial Sequence
  Synthetic
ccaccactccacagctacca

SEQ ID NO: 40224 - DNA, 20 bp, Artificial Sequence
  Synthetic
ccctggtagctgtggagtgg

SEQ ID NO: 40225 - DNA, 20 bp, Artificial Sequence
  Synthetic
tccaccactccacagctacc

SEQ ID NO: 40226 - DNA, 20 bp, Artificial Sequence
  Synthetic
tggtagctgtggagtggtgg

SEQ ID NO: 40227 - DNA, 20 bp, Artificial Sequence
  Synthetic
ctgccttgatgaagctcaga

SEQ ID NO: 40228 - DNA, 20 bp, Artificial Sequence
  Synthetic
caaccatctgagcttcatca

SEQ ID NO: 40229 - DNA, 20 bp, Artificial Sequence
  Synthetic
gaaactctcacttttactgt

SEQ ID NO: 40230 - DNA, 20 bp, Artificial Sequence
  Synthetic
agaaactctcacttttactg

SEQ ID NO: 40231 - DNA, 20 bp, Artificial Sequence
  Synthetic
ctctcatcaggctgcagaaa

SEQ ID NO: 40232 - DNA, 20 bp, Artificial Sequence
  Synthetic
gaaatggcccagcgtttgag

SEQ ID NO: 40233 - DNA, 20 bp, Artificial Sequence
  Synthetic
aaatggcccagcgtttgagt

SEQ ID NO: 40234 - DNA, 20 bp, Artificial Sequence
  Synthetic
attaatcccactcaaacgct

SEQ ID NO: 40235 - DNA, 20 bp, Artificial Sequence
  Synthetic
gattaatcccactcaaacgc

SEQ ID NO: 40236 - DNA, 20 bp, Artificial Sequence
  Synthetic
gtttgagtgggattaatcga

SEQ ID NO: 40237 - DNA, 20 bp, Artificial Sequence
  Synthetic
attaatcgatggtgtatcag

SEQ ID NO: 40238 - DNA, 20 bp, Artificial Sequence
  Synthetic
agtggcactccagtacagag

SEQ ID NO: 40239 - DNA, 20 bp, Artificial Sequence
  Synthetic
tccagtacagagaggattag

SEQ ID NO: 40240 - DNA, 20 bp, Artificial Sequence
  Synthetic
ccctctaatcctctctgtac

SEQ ID NO: 40241 - DNA, 20 bp, Artificial Sequence
  Synthetic
ccagtacagagaggattaga

SEQ ID NO: 40242 - DNA, 20 bp, Artificial Sequence
  Synthetic
tttttcttttcagatctttt

SEQ ID NO: 40243 - DNA, 20 bp, Artificial Sequence
  Synthetic
ttttcttttcagatcttttt

SEQ ID NO: 40244 - DNA, 20 bp, Artificial Sequence
  Synthetic
ttcagatctttttgggttag

SEQ ID NO: 40245 - DNA, 20 bp, Artificial Sequence
  Synthetic
tttgggttagtggtctttct

SEQ ID NO: 40246 - DNA, 20 bp, Artificial Sequence
  Synthetic
aaccttactgtgtcaaacac

SEQ ID NO: 40247 - DNA, 20 bp, Artificial Sequence
  Synthetic
caccagtgtttgacacagta

SEQ ID NO: 40248 - DNA, 20 bp, Artificial Sequence
  Synthetic
cttactgtgtcaaacactgg

SEQ ID NO: 40249 - DNA, 20 bp, Artificial Sequence
  Synthetic
ttactgtgtcaaacactggt

SEQ ID NO: 40250 - DNA, 20 bp, Artificial Sequence
  Synthetic
ggtgggttcgacttctctat

SEQ ID NO: 40251 - DNA, 20 bp, Artificial Sequence
  Synthetic
tgaggattcttcttgcagta

SEQ ID NO: 40252 - DNA, 20 bp, Artificial Sequence
  Synthetic
ataaagctgtagagatgctg

SEQ ID NO: 40253 - DNA, 20 bp, Artificial Sequence
  Synthetic
gctttattgccaagatactg

SEQ ID NO: 40254 - DNA, 20 bp, Artificial Sequence
  Synthetic
ttattgccaagatactgtgg

SEQ ID NO: 40255 - DNA, 20 bp, Artificial Sequence
  Synthetic
tgcagacctccacagtatct

SEQ ID NO: 40256 - DNA, 20 bp, Artificial Sequence
  Synthetic
cttcggtttgtggtggtatt

SEQ ID NO: 40257 - DNA, 20 bp, Artificial Sequence
  Synthetic
tgtatttcttcggtttgtgg

SEQ ID NO: 40258 - DNA, 20 bp, Artificial Sequence
  Synthetic
cagtgtatttcttcggtttg

SEQ ID NO: 40259 - DNA, 20 bp, Artificial Sequence
  Synthetic
cacaaaccgaagaaatacac

SEQ ID NO: 40260 - DNA, 20 bp, Artificial Sequence
  Synthetic
gtggagccagtgtatttctt

SEQ ID NO: 40261 - DNA, 20 bp, Artificial Sequence
  Synthetic
ctggctccacttttctccag

SEQ ID NO: 40262 - DNA, 20 bp, Artificial Sequence
  Synthetic
tccacttttctccagtggaa

SEQ ID NO: 40263 - DNA, 20 bp, Artificial Sequence
  Synthetic
gcctttccactggagaaaag

SEQ ID NO: 40264 - DNA, 20 bp, Artificial Sequence
  Synthetic
tgatagaaatgcctttccac

SEQ ID NO: 40265 - DNA, 20 bp, Artificial Sequence
  Synthetic
tttctatcaccgtcagcatg

SEQ ID NO: 40266 - DNA, 20 bp, Artificial Sequence
  Synthetic
ggcagcacacctcatgctga

SEQ ID NO: 40267 - DNA, 20 bp, Artificial Sequence
  Synthetic
tcagcatgaggtgtgctgcc

SEQ ID NO: 40268 - DNA, 20 bp, Artificial Sequence
  Synthetic
tgaggtgtgctgccaggatg

SEQ ID NO: 40269 - DNA, 20 bp, Artificial Sequence
  Synthetic
ggtgtgctgccaggatgtgg

SEQ ID NO: 40270 - DNA, 20 bp, Artificial Sequence
  Synthetic
tgagttttaccaccacatcc

SEQ ID NO: 40271 - DNA, 20 bp, Artificial Sequence
  Synthetic
aggatgtggtggtaaaactc

SEQ ID NO: 40272 - DNA, 20 bp, Artificial Sequence
  Synthetic
aactcaggaagatttctgac

SEQ ID NO: 40273 - DNA, 20 bp, Artificial Sequence
  Synthetic
actcaggaagatttctgact

SEQ ID NO: 40274 - DNA, 20 bp, Artificial Sequence
  Synthetic
agctcagcagcctagacaga

SEQ ID NO: 40275 - DNA, 20 bp, Artificial Sequence
  Synthetic
aggtgacagtccttctgtct

SEQ ID NO: 40276 - DNA, 20 bp, Artificial Sequence
  Synthetic
cagcaatggatacaggatag

SEQ ID NO: 40277 - DNA, 20 bp, Artificial Sequence
  Synthetic
ctatcctgtatccattgctg

SEQ ID NO: 40278 - DNA, 20 bp, Artificial Sequence
  Synthetic
tgagcctcagcaatggatac

SEQ ID NO: 40279 - DNA, 20 bp, Artificial Sequence
  Synthetic
tccattgctgaggctcagac

SEQ ID NO: 40280 - DNA, 20 bp, Artificial Sequence
  Synthetic
gcctgtctgagcctcagcaa

SEQ ID NO: 40281 - DNA, 20 bp, Artificial Sequence
  Synthetic
acaggcctgctgtcacccac

SEQ ID NO: 40282 - DNA, 20 bp, Artificial Sequence
  Synthetic
aacagcctgtgggtgacagc

SEQ ID NO: 40283 - DNA, 20 bp, Artificial Sequence
  Synthetic
tgtcacccacaggctgttcg

SEQ ID NO: 40284 - DNA, 20 bp, Artificial Sequence
  Synthetic
actctccacgaacagcctgt

SEQ ID NO: 40285 - DNA, 20 bp, Artificial Sequence
  Synthetic
aactctccacgaacagcctg

SEQ ID NO: 40286 - DNA, 20 bp, Artificial Sequence
  Synthetic
attatagttctaactggagc

SEQ ID NO: 40287 - DNA, 20 bp, Artificial Sequence
  Synthetic
ttatagttctaactggagct

SEQ ID NO: 40288 - DNA, 20 bp, Artificial Sequence
  Synthetic
tatagttctaactggagctg

SEQ ID NO: 40289 - DNA, 20 bp, Artificial Sequence
  Synthetic
ttttaggtgtctgtttcatg

SEQ ID NO: 40290 - DNA, 20 bp, Artificial Sequence
  Synthetic
catgtggaatacctgacttc

SEQ ID NO: 40291 - DNA, 20 bp, Artificial Sequence
  Synthetic
gaatacctgacttcaggtca

SEQ ID NO: 40292 - DNA, 20 bp, Artificial Sequence
  Synthetic
aatacctgacttcaggtcaa

SEQ ID NO: 40293 - DNA, 20 bp, Artificial Sequence
  Synthetic
ccatcccttgacctgaagtc

SEQ ID NO: 40294 - DNA, 20 bp, Artificial Sequence
  Synthetic
cctgacttcaggtcaaggga

SEQ ID NO: 40295 - DNA, 20 bp, Artificial Sequence
  Synthetic
gatctgggaagtctacagca

SEQ ID NO: 40296 - DNA, 20 bp, Artificial Sequence
  Synthetic
cttgaggatctggaagatct

SEQ ID NO: 40297 - DNA, 20 bp, Artificial Sequence
  Synthetic
gcttgaggatctggaagatc

SEQ ID NO: 40298 - DNA, 20 bp, Artificial Sequence
  Synthetic
tcaaacatcgcttgaggatc

SEQ ID NO: 40299 - DNA, 20 bp, Artificial Sequence
  Synthetic
tcaatatcaaacatcgcttg

SEQ ID NO: 40300 - DNA, 20 bp, Artificial Sequence
  Synthetic
gcaaacttgaagaatggtct

SEQ ID NO: 40301 - DNA, 20 bp, Artificial Sequence
  Synthetic
accattcttcaagtttgcaa

SEQ ID NO: 40302 - DNA, 20 bp, Artificial Sequence
  Synthetic
acctttgcaaacttgaagaa

SEQ ID NO: 40303 - DNA, 20 bp, Artificial Sequence
  Synthetic
ttgatacaggaaatatatcc

SEQ ID NO: 40304 - DNA, 20 bp, Artificial Sequence
  Synthetic
agagatggctggaattgtcc

SEQ ID NO: 40305 - DNA, 20 bp, Artificial Sequence
  Synthetic
atttgtgacagagagatggc

SEQ ID NO: 40306 - DNA, 20 bp, Artificial Sequence
  Synthetic
atgaatttgtgacagagaga

SEQ ID NO: 40307 - DNA, 20 bp, Artificial Sequence
  Synthetic
attcatagccttgtcagata

SEQ ID NO: 40308 - DNA, 20 bp, Artificial Sequence
  Synthetic
atagccttgtcagataagga

SEQ ID NO: 40309 - DNA, 20 bp, Artificial Sequence
  Synthetic
ttttccttccttatctgaca

SEQ ID NO: 40310 - DNA, 20 bp, Artificial Sequence
  Synthetic
tacccagaacatagacacgc

SEQ ID NO: 40311 - DNA, 20 bp, Artificial Sequence
  Synthetic
ttccagcgtgtctatgttct

SEQ ID NO: 40312 - DNA, 20 bp, Artificial Sequence
  Synthetic
gttccagcgtgtctatgttc

SEQ ID NO: 40313 - DNA, 20 bp, Artificial Sequence
  Synthetic
gaacatagacacgctggaac

SEQ ID NO: 40314 - DNA, 20 bp, Artificial Sequence
  Synthetic
agacacgctggaacaggttg

SEQ ID NO: 40315 - DNA, 20 bp, Artificial Sequence
  Synthetic
gacacgctggaacaggttgc

SEQ ID NO: 40316 - DNA, 20 bp, Artificial Sequence
  Synthetic
aacaggttgcgggaatccaa

SEQ ID NO: 40317 - DNA, 20 bp, Artificial Sequence
  Synthetic
catgacactgaattatcctt

SEQ ID NO: 40318 - DNA, 20 bp, Artificial Sequence
  Synthetic
caaaggataattcagtgtca

SEQ ID NO: 40319 - DNA, 20 bp, Artificial Sequence
  Synthetic
caggcaagatgctgttgcaa

SEQ ID NO: 40320 - DNA, 20 bp, Artificial Sequence
  Synthetic
caactttgtatttacaaatc

SEQ ID NO: 40321 - DNA, 20 bp, Artificial Sequence
  Synthetic
gttgactgtgaagctgtacg

SEQ ID NO: 40322 - DNA, 20 bp, Artificial Sequence
  Synthetic
acgaggagatatttttaatc

SEQ ID NO: 40323 - DNA, 20 bp, Artificial Sequence
  Synthetic
aggtagttcctcgatgtcct

SEQ ID NO: 40324 - DNA, 20 bp, Artificial Sequence
  Synthetic
gctgggcacctaggacatcg

SEQ ID NO: 40325 - DNA, 20 bp, Artificial Sequence
  Synthetic
ggttcatcagctgggcacct

SEQ ID NO: 40326 - DNA, 20 bp, Artificial Sequence
  Synthetic
tagcaagcggttcatcagct

SEQ ID NO: 40327 - DNA, 20 bp, Artificial Sequence
  Synthetic
atagcaagcggttcatcagc

SEQ ID NO: 40328 - DNA, 20 bp, Artificial Sequence
  Synthetic
tctggtttcatgatagcaag

SEQ ID NO: 40329 - DNA, 20 bp, Artificial Sequence
  Synthetic
aaaccagagattgtgttttt

SEQ ID NO: 40330 - DNA, 20 bp, Artificial Sequence
  Synthetic
tcaccaaaaaacacaatctc

SEQ ID NO: 40331 - DNA, 20 bp, Artificial Sequence
  Synthetic
atggctctatgaaactgttc

SEQ ID NO: 40332 - DNA, 20 bp, Artificial Sequence
  Synthetic
ttcatctttgtcatacttca

SEQ ID NO: 40333 - DNA, 20 bp, Artificial Sequence
  Synthetic
gttgacctcctcattgttat

SEQ ID NO: 40334 - DNA, 20 bp, Artificial Sequence
  Synthetic
ttgacctcctcattgttatt

SEQ ID NO: 40335 - DNA, 20 bp, Artificial Sequence
  Synthetic
aagacccaataacaatgagg

SEQ ID NO: 40336 - DNA, 20 bp, Artificial Sequence
  Synthetic
gggaagacccaataacaatg

SEQ ID NO: 40337 - DNA, 20 bp, Artificial Sequence
  Synthetic
tgctactggtcttactttga

SEQ ID NO: 40338 - DNA, 20 bp, Artificial Sequence
  Synthetic
gtgctactggtcttactttg

SEQ ID NO: 40339 - DNA, 20 bp, Artificial Sequence
  Synthetic
gtcatctgtttggtgggagc

SEQ ID NO: 40340 - DNA, 20 bp, Artificial Sequence
  Synthetic
ggagaagggttacttacatg

SEQ ID NO: 40341 - DNA, 20 bp, Artificial Sequence
  Synthetic
gacccccctttcctagccgc

SEQ ID NO: 40342 - DNA, 20 bp, Artificial Sequence
  Synthetic
gcgaaagtcggggatgcctg

SEQ ID NO: 40343 - DNA, 20 bp, Artificial Sequence
  Synthetic
tggatggagagcgaaagtcg

SEQ ID NO: 40344 - DNA, 20 bp, Artificial Sequence
  Synthetic
gtggatggagagcgaaagtc

SEQ ID NO: 40345 - DNA, 20 bp, Artificial Sequence
  Synthetic
ggtggatggagagcgaaagt

SEQ ID NO: 40346 - DNA, 20 bp, Artificial Sequence
  Synthetic
gactttcgctctccatccac

SEQ ID NO: 40347 - DNA, 20 bp, Artificial Sequence
  Synthetic
ttgtcatagaggccggtgga

SEQ ID NO: 40348 - DNA, 20 bp, Artificial Sequence
  Synthetic
taggttgtcatagaggccgg

SEQ ID NO: 40349 - DNA, 20 bp, Artificial Sequence
  Synthetic
ctctaggttgtcatagaggc

SEQ ID NO: 40350 - DNA, 20 bp, Artificial Sequence
  Synthetic
acttctctaggttgtcatag

SEQ ID NO: 40351 - DNA, 20 bp, Artificial Sequence
  Synthetic
agggaagatggtacttctct

SEQ ID NO: 40352 - DNA, 20 bp, Artificial Sequence
  Synthetic
gtaccatcttccctacccag

SEQ ID NO: 40353 - DNA, 20 bp, Artificial Sequence
  Synthetic
tggcctctgggtagggaaga

SEQ ID NO: 40354 - DNA, 20 bp, Artificial Sequence
  Synthetic
tcaaagatggcctctgggta

SEQ ID NO: 40355 - DNA, 20 bp, Artificial Sequence
  Synthetic
ctcaaagatggcctctgggt

SEQ ID NO: 40356 - DNA, 20 bp, Artificial Sequence
  Synthetic
tgatctcaaagatggcctct

SEQ ID NO: 40357 - DNA, 20 bp, Artificial Sequence
  Synthetic
ctgatctcaaagatggcctc

SEQ ID NO: 40358 - DNA, 20 bp, Artificial Sequence
  Synthetic
gaaatagctgatctcaaaga

SEQ ID NO: 40359 - DNA, 20 bp, Artificial Sequence
  Synthetic
ctttgagatcagctatttca

SEQ ID NO: 40360 - DNA, 20 bp, Artificial Sequence
  Synthetic
gtctctcctacagaaacatc

SEQ ID NO: 40361 - DNA, 20 bp, Artificial Sequence
  Synthetic
gcgagggcgaagaagggttc

SEQ ID NO: 40362 - DNA, 20 bp, Artificial Sequence
  Synthetic
acccttcttcgccctcgcca

SEQ ID NO: 40363 - DNA, 20 bp, Artificial Sequence
  Synthetic
tccttggcgagggcgaagaa

SEQ ID NO: 40364 - DNA, 20 bp, Artificial Sequence
  Synthetic
ttccttggcgagggcgaaga

SEQ ID NO: 40365 - DNA, 20 bp, Artificial Sequence
  Synthetic
aggatagagttccttggcga

SEQ ID NO: 40366 - DNA, 20 bp, Artificial Sequence
  Synthetic
caggatagagttccttggcg

SEQ ID NO: 40367 - DNA, 20 bp, Artificial Sequence
  Synthetic
ctcgccaaggaactctatcc

SEQ ID NO: 40368 - DNA, 20 bp, Artificial Sequence
  Synthetic
tcgccaaggaactctatcct

SEQ ID NO: 40369 - DNA, 20 bp, Artificial Sequence
  Synthetic
ctgcccaggatagagttcct

SEQ ID NO: 40370 - DNA, 20 bp, Artificial Sequence
  Synthetic
actctatcctgggcagttca

SEQ ID NO: 40371 - DNA, 20 bp, Artificial Sequence
  Synthetic
gatctcaccttgaactgccc

SEQ ID NO: 40372 - DNA, 20 bp, Artificial Sequence
  Synthetic
atgaagtagtgacagatggt

SEQ ID NO: 40373 - DNA, 20 bp, Artificial Sequence
  Synthetic
gcgcatgaagtagtgacaga

SEQ ID NO: 40374 - DNA, 20 bp, Artificial Sequence
  Synthetic
ctacttcatgcgcctgctga

SEQ ID NO: 40375 - DNA, 20 bp, Artificial Sequence
  Synthetic
catgcgcctgctgaaggaca

SEQ ID NO: 40376 - DNA, 20 bp, Artificial Sequence
  Synthetic
atgcgcctgctgaaggacaa

SEQ ID NO: 40377 - DNA, 20 bp, Artificial Sequence
  Synthetic
tgcgcctgctgaaggacaag

SEQ ID NO: 40378 - DNA, 20 bp, Artificial Sequence
  Synthetic
gtagccccttgtccttcagc

SEQ ID NO: 40379 - DNA, 20 bp, Artificial Sequence
  Synthetic
actcctgcgctgctacacgc

SEQ ID NO: 40380 - DNA, 20 bp, Artificial Sequence
  Synthetic
ctacctgcgtgtagcagcgc

SEQ ID NO: 40381 - DNA, 20 bp, Artificial Sequence
  Synthetic
ctgcgctgctacacgcaggt

SEQ ID NO: 40382 - DNA, 20 bp, Artificial Sequence
  Synthetic
cctctagaacatagataccc

SEQ ID NO: 40383 - DNA, 20 bp, Artificial Sequence
  Synthetic
gataccctggagcgaatagc

SEQ ID NO: 40384 - DNA, 20 bp, Artificial Sequence
  Synthetic
ataccctggagcgaatagcc

SEQ ID NO: 40385 - DNA, 20 bp, Artificial Sequence
  Synthetic
cagcccggctattcgctcca

SEQ ID NO: 40386 - DNA, 20 bp, Artificial Sequence
  Synthetic
ccagcccggctattcgctcc

SEQ ID NO: 40387 - DNA, 20 bp, Artificial Sequence
  Synthetic
cctggagcgaatagccgggc

SEQ ID NO: 40388 - DNA, 20 bp, Artificial Sequence
  Synthetic
gcgaatagccgggctggaac

SEQ ID NO: 40389 - DNA, 20 bp, Artificial Sequence
  Synthetic
aatagccgggctggaacagg

SEQ ID NO: 40390 - DNA, 20 bp, Artificial Sequence
  Synthetic
caagtcctcctgttccagcc

SEQ ID NO: 40391 - DNA, 20 bp, Artificial Sequence
  Synthetic
cgggctggaacaggaggact

SEQ ID NO: 40392 - DNA, 20 bp, Artificial Sequence
  Synthetic
gctggaacaggaggacttgg

SEQ ID NO: 40393 - DNA, 20 bp, Artificial Sequence
  Synthetic
ggaacaggaggacttggtgg

SEQ ID NO: 40394 - DNA, 20 bp, Artificial Sequence
  Synthetic
gaggacttggtggaggcgca

SEQ ID NO: 40395 - DNA, 20 bp, Artificial Sequence
  Synthetic
gacgcagtgtgatgtgtaga

SEQ ID NO: 40396 - DNA, 20 bp, Artificial Sequence
  Synthetic
actgcgtcagcgccagctgc

SEQ ID NO: 40397 - DNA, 20 bp, Artificial Sequence
  Synthetic
cgggtattcgtgccggcagc

SEQ ID NO: 40398 - DNA, 20 bp, Artificial Sequence
  Synthetic
agcttagcgggtattcgtgc

SEQ ID NO: 40399 - DNA, 20 bp, Artificial Sequence
  Synthetic
ggcacgaatacccgctaagc

SEQ ID NO: 40400 - DNA, 20 bp, Artificial Sequence
  Synthetic
tacccgctaagctggatgaa

SEQ ID NO: 40401 - DNA, 20 bp, Artificial Sequence
  Synthetic
cacctttcatccagcttagc

SEQ ID NO: 40402 - DNA, 20 bp, Artificial Sequence
  Synthetic
tcacctttcatccagcttag

SEQ ID NO: 40403 - DNA, 20 bp, Artificial Sequence
  Synthetic
cccagagaagatcttctctg

SEQ ID NO: 40404 - DNA, 20 bp, Artificial Sequence
  Synthetic
acctcagagaagatcttctc

SEQ ID NO: 40405 - DNA, 20 bp, Artificial Sequence
  Synthetic
ctctgacagtcttcacactt

SEQ ID NO: 40406 - DNA, 20 bp, Artificial Sequence
  Synthetic
gctctgacagtcttcacact

SEQ ID NO: 40407 - DNA, 20 bp, Artificial Sequence
  Synthetic
gtgtgaagactgtcagagcc

SEQ ID NO: 40408 - DNA, 20 bp, Artificial Sequence
  Synthetic
tgtcagagcctggtgaagcc

SEQ ID NO: 40409 - DNA, 20 bp, Artificial Sequence
  Synthetic
gaggctcaccaggcttcacc

SEQ ID NO: 40410 - DNA, 20 bp, Artificial Sequence
  Synthetic
acctcagatatcgtcttttt

SEQ ID NO: 40411 - DNA, 20 bp, Artificial Sequence
  Synthetic
aggagaagaaacgcgctggg

SEQ ID NO: 40412 - DNA, 20 bp, Artificial Sequence
  Synthetic
tacaggagaagaaacgcgct

SEQ ID NO: 40413 - DNA, 20 bp, Artificial Sequence
  Synthetic
atacaggagaagaaacgcgc

SEQ ID NO: 40414 - DNA, 20 bp, Artificial Sequence
  Synthetic
gccacttactgactgcatac

SEQ ID NO: 40415 - DNA, 20 bp, Artificial Sequence
  Synthetic
ctccccgcaggacttcctga

SEQ ID NO: 40416 - DNA, 20 bp, Artificial Sequence
  Synthetic
cccgcaggacttcctgaagg

SEQ ID NO: 40417 - DNA, 20 bp, Artificial Sequence
  Synthetic
ccaggaggaggtccaccttc

SEQ ID NO: 40418 - DNA, 20 bp, Artificial Sequence
  Synthetic
cctgaaggtggacctcctcc

SEQ ID NO: 40419 - DNA, 20 bp, Artificial Sequence
  Synthetic
ggtggacctcctcctggtca

SEQ ID NO: 40420 - DNA, 20 bp, Artificial Sequence
  Synthetic
gtggacctcctcctggtcat

SEQ ID NO: 40421 - DNA, 20 bp, Artificial Sequence
  Synthetic
aggtacccatgaccaggagg

SEQ ID NO: 40422 - DNA, 20 bp, Artificial Sequence
  Synthetic
aggaggtacccatgaccagg

SEQ ID NO: 40423 - DNA, 20 bp, Artificial Sequence
  Synthetic
gcaaggaggtacccatgacc

SEQ ID NO: 40424 - DNA, 20 bp, Artificial Sequence
  Synthetic
ggtcatgggtacctccttgc

SEQ ID NO: 40425 - DNA, 20 bp, Artificial Sequence
  Synthetic
aaagggctgcacctgcaagg

SEQ ID NO: 40426 - DNA, 20 bp, Artificial Sequence
  Synthetic
ggcaaagggctgcacctgca

SEQ ID NO: 40427 - DNA, 20 bp, Artificial Sequence
  Synthetic
gtggtggtcatggtgggggc

SEQ ID NO: 40428 - DNA, 20 bp, Artificial Sequence
  Synthetic
gccggcatcagcacacccag

SEQ ID NO: 40429 - DNA, 20 bp, Artificial Sequence
  Synthetic
gccactgggtgtgctgatgc

SEQ ID NO: 40430 - DNA, 20 bp, Artificial Sequence
  Synthetic
ctgaagtctggaatgccact

SEQ ID NO: 40431 - DNA, 20 bp, Artificial Sequence
  Synthetic
cctgaagtctggaatgccac

SEQ ID NO: 40432 - DNA, 20 bp, Artificial Sequence
  Synthetic
ccagtggcattccagacttc

SEQ ID NO: 40433 - DNA, 20 bp, Artificial Sequence
  Synthetic
tgtgggcagtacctgaagtc

SEQ ID NO: 40434 - DNA, 20 bp, Artificial Sequence
  Synthetic
cttctctccctgcagatcgc

SEQ ID NO: 40435 - DNA, 20 bp, Artificial Sequence
  Synthetic
ttctctccctgcagatcgcc

SEQ ID NO: 40436 - DNA, 20 bp, Artificial Sequence
  Synthetic
tctctccctgcagatcgccg

SEQ ID NO: 40437 - DNA, 20 bp, Artificial Sequence
  Synthetic
ccctgcagatcgccggggag

SEQ ID NO: 40438 - DNA, 20 bp, Artificial Sequence
  Synthetic
ttgctgtacaggccactccc

SEQ ID NO: 40439 - DNA, 20 bp, Artificial Sequence
  Synthetic
actgctggaggttgctgtac

SEQ ID NO: 40440 - DNA, 20 bp, Artificial Sequence
  Synthetic
acgggagatcgtactgctgg

SEQ ID NO: 40441 - DNA, 20 bp, Artificial Sequence
  Synthetic
ggtacgggagatcgtactgc

SEQ ID NO: 40442 - DNA, 20 bp, Artificial Sequence
  Synthetic
gtacgatctcccgtaccccg

SEQ ID NO: 40443 - DNA, 20 bp, Artificial Sequence
  Synthetic
caaaaatggcctcggggtac

SEQ ID NO: 40444 - DNA, 20 bp, Artificial Sequence
  Synthetic
tcaaaaatggcctcggggta

SEQ ID NO: 40445 - DNA, 20 bp, Artificial Sequence
  Synthetic
ggagttcaaaaatggcctcg

SEQ ID NO: 40446 - DNA, 20 bp, Artificial Sequence
  Synthetic
gggagttcaaaaatggcctc

SEQ ID NO: 40447 - DNA, 20 bp, Artificial Sequence
  Synthetic
tgggagttcaaaaatggcct

SEQ ID NO: 40448 - DNA, 20 bp, Artificial Sequence
  Synthetic
gaagaatgggagttcaaaaa

SEQ ID NO: 40449 - DNA, 20 bp, Artificial Sequence
  Synthetic
tggggttgtgaaagaagaat

SEQ ID NO: 40450 - DNA, 20 bp, Artificial Sequence
  Synthetic
ttggggttgtgaaagaagaa

SEQ ID NO: 40451 - DNA, 20 bp, Artificial Sequence
  Synthetic
ccaaagtgaaaaagggcttg

SEQ ID NO: 40452 - DNA, 20 bp, Artificial Sequence
  Synthetic
ccccaagccctttttcactt

SEQ ID NO: 40453 - DNA, 20 bp, Artificial Sequence
  Synthetic
gccaaagtgaaaaagggctt

SEQ ID NO: 40454 - DNA, 20 bp, Artificial Sequence
  Synthetic
ggccaaagtgaaaaagggct

SEQ ID NO: 40455 - DNA, 20 bp, Artificial Sequence
  Synthetic
gccctttttcactttggcca

SEQ ID NO: 40456 - DNA, 20 bp, Artificial Sequence
  Synthetic
tccttggccaaagtgaaaaa

SEQ ID NO: 40457 - DNA, 20 bp, Artificial Sequence
  Synthetic
ctccttggccaaagtgaaaa

SEQ ID NO: 40458 - DNA, 20 bp, Artificial Sequence
  Synthetic
ttggccaaggagctgtaccc

SEQ ID NO: 40459 - DNA, 20 bp, Artificial Sequence
  Synthetic
gtttccagggtacagctcct

SEQ ID NO: 40460 - DNA, 20 bp, Artificial Sequence
  Synthetic
cgttgggcttgtagtttcca

SEQ ID NO: 40461 - DNA, 20 bp, Artificial Sequence
  Synthetic
acgttgggcttgtagtttcc

SEQ ID NO: 40462 - DNA, 20 bp, Artificial Sequence
  Synthetic
agaaagtagtgagtgacgtt

SEQ ID NO: 40463 - DNA, 20 bp, Artificial Sequence
  Synthetic
gagaaagtagtgagtgacgt

SEQ ID NO: 40464 - DNA, 20 bp, Artificial Sequence
  Synthetic
acgtcactcactactttctc

SEQ ID NO: 40465 - DNA, 20 bp, Artificial Sequence
  Synthetic
tctccggctgcttcatgaca

SEQ ID NO: 40466 - DNA, 20 bp, Artificial Sequence
  Synthetic
ctccggctgcttcatgacaa

SEQ ID NO: 40467 - DNA, 20 bp, Artificial Sequence
  Synthetic
tccggctgcttcatgacaag

SEQ ID NO: 40468 - DNA, 20 bp, Artificial Sequence
  Synthetic
gccccttgtcatgaagcagc

SEQ ID NO: 40469 - DNA, 20 bp, Artificial Sequence
  Synthetic
atgacaaggggctgcttctg

SEQ ID NO: 40470 - DNA, 20 bp, Artificial Sequence
  Synthetic
ctctacacgcagaacatcga

SEQ ID NO: 40471 - DNA, 20 bp, Artificial Sequence
  Synthetic
tctacacgcagaacatcgat

SEQ ID NO: 40472 - DNA, 20 bp, Artificial Sequence
  Synthetic
aacatcgatgggcttgagag

SEQ ID NO: 40473 - DNA, 20 bp, Artificial Sequence
  Synthetic
ttggcttgaatttcagtgtc

SEQ ID NO: 40474 - DNA, 20 bp, Artificial Sequence
  Synthetic
gggcatccctgcctcaaagc

SEQ ID NO: 40475 - DNA, 20 bp, Artificial Sequence
  Synthetic
cttcaaccagctttgaggca

SEQ ID NO: 40476 - DNA, 20 bp, Artificial Sequence
  Synthetic
gcttcaaccagctttgaggc

SEQ ID NO: 40477 - DNA, 20 bp, Artificial Sequence
  Synthetic
atgagcttcaaccagctttg

SEQ ID NO: 40478 - DNA, 20 bp, Artificial Sequence
  Synthetic
tcaaagctggttgaagctca

SEQ ID NO: 40479 - DNA, 20 bp, Artificial Sequence
  Synthetic
tgtgcaggtggcagaggcaa

SEQ ID NO: 40480 - DNA, 20 bp, Artificial Sequence
  Synthetic
gcagactgtgcaggtggcag

SEQ ID NO: 40481 - DNA, 20 bp, Artificial Sequence
  Synthetic
tctttggcagactgtgcagg

SEQ ID NO: 40482 - DNA, 20 bp, Artificial Sequence
  Synthetic
gggtctttggcagactgtgc

SEQ ID NO: 40483 - DNA, 20 bp, Artificial Sequence
  Synthetic
gtctgccaaagacccttccc

SEQ ID NO: 40484 - DNA, 20 bp, Artificial Sequence
  Synthetic
tctgccaaagacccttccca

SEQ ID NO: 40485 - DNA, 20 bp, Artificial Sequence
  Synthetic
ctgccaaagacccttcccag

SEQ ID NO: 40486 - DNA, 20 bp, Artificial Sequence
  Synthetic
cctcccctgggaagggtctt

SEQ ID NO: 40487 - DNA, 20 bp, Artificial Sequence
  Synthetic
ccaaagacccttcccagggg

SEQ ID NO: 40488 - DNA, 20 bp, Artificial Sequence
  Synthetic
cgaatgtcctcccctgggaa

SEQ ID NO: 40489 - DNA, 20 bp, Artificial Sequence
  Synthetic
ccgaatgtcctcccctggga

SEQ ID NO: 40490 - DNA, 20 bp, Artificial Sequence
  Synthetic
ccttcccaggggaggacatt

SEQ ID NO: 40491 - DNA, 20 bp, Artificial Sequence
  Synthetic
cttcccaggggaggacattc

SEQ ID NO: 40492 - DNA, 20 bp, Artificial Sequence
  Synthetic
tcacccgaatgtcctcccct

SEQ ID NO: 40493 - DNA, 20 bp, Artificial Sequence
  Synthetic
ctcacccgaatgtcctcccc

SEQ ID NO: 40494 - DNA, 20 bp, Artificial Sequence
  Synthetic
tgttttccaggctgacgtga

SEQ ID NO: 40495 - DNA, 20 bp, Artificial Sequence
  Synthetic
tgtctgccatcacgtcagcc

SEQ ID NO: 40496 - DNA, 20 bp, Artificial Sequence
  Synthetic
aggctgacgtgatggcagac

SEQ ID NO: 40497 - DNA, 20 bp, Artificial Sequence
  Synthetic
ggctgacgtgatggcagaca

SEQ ID NO: 40498 - DNA, 20 bp, Artificial Sequence
  Synthetic
agacagggttccccgctgcc

SEQ ID NO: 40499 - DNA, 20 bp, Artificial Sequence
  Synthetic
ccggtgcagaccgggcagcg

SEQ ID NO: 40500 - DNA, 20 bp, Artificial Sequence
  Synthetic
ccccgctgcccggtctgcac

SEQ ID NO: 40501 - DNA, 20 bp, Artificial Sequence
  Synthetic
gccggtgcagaccgggcagc

SEQ ID NO: 40502 - DNA, 20 bp, Artificial Sequence
  Synthetic
cgccggtgcagaccgggcag

SEQ ID NO: 40503 - DNA, 20 bp, Artificial Sequence
  Synthetic
tcacaacgccggtgcagacc

SEQ ID NO: 40504 - DNA, 20 bp, Artificial Sequence
  Synthetic
ttcacaacgccggtgcagac

SEQ ID NO: 40505 - DNA, 20 bp, Artificial Sequence
  Synthetic
aatgtcgggcttcacaacgc

SEQ ID NO: 40506 - DNA, 20 bp, Artificial Sequence
  Synthetic
aagcccgacattgtgttctt

SEQ ID NO: 40507 - DNA, 20 bp, Artificial Sequence
  Synthetic
agcccgacattgtgttcttt

SEQ ID NO: 40508 - DNA, 20 bp, Artificial Sequence
  Synthetic
gcccgacattgtgttctttg

SEQ ID NO: 40509 - DNA, 20 bp, Artificial Sequence
  Synthetic
tccccaaagaacacaatgtc

SEQ ID NO: 40510 - DNA, 20 bp, Artificial Sequence
  Synthetic
ctccccaaagaacacaatgt

SEQ ID NO: 40511 - DNA, 20 bp, Artificial Sequence
  Synthetic
ttggggagccgctgccccag

SEQ ID NO: 40512 - DNA, 20 bp, Artificial Sequence
  Synthetic
agcaagaacctctggggcag

SEQ ID NO: 40513 - DNA, 20 bp, Artificial Sequence
  Synthetic
acatgcagcaagaacctctg

SEQ ID NO: 40514 - DNA, 20 bp, Artificial Sequence
  Synthetic
cacatgcagcaagaacctct

SEQ ID NO: 40515 - DNA, 20 bp, Artificial Sequence
  Synthetic
ccacatgcagcaagaacctc

SEQ ID NO: 40516 - DNA, 20 bp, Artificial Sequence
  Synthetic
ccagaggttcttgctgcatg

SEQ ID NO: 40517 - DNA, 20 bp, Artificial Sequence
  Synthetic
gcatgtggttgatttcccca

SEQ ID NO: 40518 - DNA, 20 bp, Artificial Sequence
  Synthetic
tgagcagcagatctgccatg

SEQ ID NO: 40519 - DNA, 20 bp, Artificial Sequence
  Synthetic
atgagcagcagatctgccat

SEQ ID NO: 40520 - DNA, 20 bp, Artificial Sequence
  Synthetic
gatgagcagcagatctgcca

SEQ ID NO: 40521 - DNA, 20 bp, Artificial Sequence
  Synthetic
gcagatctgctgctcatcct

SEQ ID NO: 40522 - DNA, 20 bp, Artificial Sequence
  Synthetic
cagatctgctgctcatcctt

SEQ ID NO: 40523 - DNA, 20 bp, Artificial Sequence
  Synthetic
gctcatccttgggacctccc

SEQ ID NO: 40524 - DNA, 20 bp, Artificial Sequence
  Synthetic
catccttgggacctccctgg

SEQ ID NO: 40525 - DNA, 20 bp, Artificial Sequence
  Synthetic
aaacctccagggaggtccca

SEQ ID NO: 40526 - DNA, 20 bp, Artificial Sequence
  Synthetic
ctgctgacaaacctccaggg

SEQ ID NO: 40527 - DNA, 20 bp, Artificial Sequence
  Synthetic
ggcctgctgacaaacctcca

SEQ ID NO: 40528 - DNA, 20 bp, Artificial Sequence
  Synthetic
aggcctgctgacaaacctcc

SEQ ID NO: 40529 - DNA, 20 bp, Artificial Sequence
  Synthetic
ctccttgtgatgactggggc

SEQ ID NO: 40530 - DNA, 20 bp, Artificial Sequence
  Synthetic
ggcaggaatctccaccgaat

SEQ ID NO: 40531 - DNA, 20 bp, Artificial Sequence
  Synthetic
gcaggaatctccaccgaatc

SEQ ID NO: 40532 - DNA, 20 bp, Artificial Sequence
  Synthetic
caggaatctccaccgaatcg

SEQ ID NO: 40533 - DNA, 20 bp, Artificial Sequence
  Synthetic
gtctggtatccccgattcgg

SEQ ID NO: 40534 - DNA, 20 bp, Artificial Sequence
  Synthetic
gtagtctggtatccccgatt

SEQ ID NO: 40535 - DNA, 20 bp, Artificial Sequence
  Synthetic
aatcggggataccagactac

SEQ ID NO: 40536 - DNA, 20 bp, Artificial Sequence
  Synthetic
actttttctgacctgtagtc

SEQ ID NO: 40537 - DNA, 20 bp, Artificial Sequence
  Synthetic
agactacaggtcagaaaaag

SEQ ID NO: 40538 - DNA, 20 bp, Artificial Sequence
  Synthetic
gactacaggtcagaaaaagt

SEQ ID NO: 40539 - DNA, 20 bp, Artificial Sequence
  Synthetic
actacaggtcagaaaaagtg

SEQ ID NO: 40540 - DNA, 20 bp, Artificial Sequence
  Synthetic
tttatgcccgcactgaccgc

SEQ ID NO: 40541 - DNA, 20 bp, Artificial Sequence
  Synthetic
gatgggcctgcggtcagtgc

SEQ ID NO: 40542 - DNA, 20 bp, Artificial Sequence
  Synthetic
ggatgggcctgcggtcagtg

SEQ ID NO: 40543 - DNA, 20 bp, Artificial Sequence
  Synthetic
gaccgcaggcccatccagca

SEQ ID NO: 40544 - DNA, 20 bp, Artificial Sequence
  Synthetic
caccatgctggatgggcctg

SEQ ID NO: 40545 - DNA, 20 bp, Artificial Sequence
  Synthetic
acaaaatcaccatgctggat

SEQ ID NO: 40546 - DNA, 20 bp, Artificial Sequence
  Synthetic
gacaaaatcaccatgctgga

SEQ ID NO: 40547 - DNA, 20 bp, Artificial Sequence
  Synthetic
tccagcatggtgattttgtc

SEQ ID NO: 40548 - DNA, 20 bp, Artificial Sequence
  Synthetic
tccggacaaaatcaccatgc

SEQ ID NO: 40549 - DNA, 20 bp, Artificial Sequence
  Synthetic
gctggcggattggggcactc

SEQ ID NO: 40550 - DNA, 20 bp, Artificial Sequence
  Synthetic
ggagtgccccaatccgccag

SEQ ID NO: 40551 - DNA, 20 bp, Artificial Sequence
  Synthetic
ccagtaccgctggcggattg

SEQ ID NO: 40552 - DNA, 20 bp, Artificial Sequence
  Synthetic
ccccaatccgccagcggtac

SEQ ID NO: 40553 - DNA, 20 bp, Artificial Sequence
  Synthetic
cccagtaccgctggcggatt

SEQ ID NO: 40554 - DNA, 20 bp, Artificial Sequence
  Synthetic
cccaatccgccagcggtact

SEQ ID NO: 40555 - DNA, 20 bp, Artificial Sequence
  Synthetic
gcccagtaccgctggcggat

SEQ ID NO: 40556 - DNA, 20 bp, Artificial Sequence
  Synthetic
ttctcgcccagtaccgctgg

SEQ ID NO: 40557 - DNA, 20 bp, Artificial Sequence
  Synthetic
agtttctcgcccagtaccgc

SEQ ID NO: 40558 - DNA, 20 bp, Artificial Sequence
  Synthetic
tactgggcgagaaacttcgt

SEQ ID NO: 40559 - DNA, 20 bp, Artificial Sequence
  Synthetic
gggcgagaaacttcgtaggc

SEQ ID NO: 40560 - DNA, 20 bp, Artificial Sequence
  Synthetic
ggctggtgggaggagaattg

SEQ ID NO: 40561 - DNA, 20 bp, Artificial Sequence
  Synthetic
tgcagggttaggctggtggg

SEQ ID NO: 40562 - DNA, 20 bp, Artificial Sequence
  Synthetic
gtgtgcagggttaggctggt

SEQ ID NO: 40563 - DNA, 20 bp, Artificial Sequence
  Synthetic
agtgtgcagggttaggctgg

SEQ ID NO: 40564 - DNA, 20 bp, Artificial Sequence
  Synthetic
accagcctaaccctgcacac

SEQ ID NO: 40565 - DNA, 20 bp, Artificial Sequence
  Synthetic
cccagtgtgcagggttaggc

SEQ ID NO: 40566 - DNA, 20 bp, Artificial Sequence
  Synthetic
ccagcctaaccctgcacact

SEQ ID NO: 40567 - DNA, 20 bp, Artificial Sequence
  Synthetic
aaagcccagtgtgcagggtt

SEQ ID NO: 40568 - DNA, 20 bp, Artificial Sequence
  Synthetic
tgctcaaagcccagtgtgca

SEQ ID NO: 40569 - DNA, 20 bp, Artificial Sequence
  Synthetic
gtgctcaaagcccagtgtgc

SEQ ID NO: 40570 - DNA, 20 bp, Artificial Sequence
  Synthetic
cacactgggctttgagcacc

SEQ ID NO: 40571 - DNA, 20 bp, Artificial Sequence
  Synthetic
acactgggctttgagcacct

SEQ ID NO: 40572 - DNA, 20 bp, Artificial Sequence
  Synthetic
ttgagcacctgggagaaact

SEQ ID NO: 40573 - DNA, 20 bp, Artificial Sequence
  Synthetic
cagctttccgagtttctccc

SEQ ID NO: 40574 - DNA, 20 bp, Artificial Sequence
  Synthetic
agaaactcggaaagctgtac

SEQ ID NO: 40575 - DNA, 20 bp, Artificial Sequence
  Synthetic
actcggaaagctgtactggt

SEQ ID NO: 40576 - DNA, 20 bp, Artificial Sequence
  Synthetic
ctggttggtgacccaaaatg

SEQ ID NO: 40577 - DNA, 20 bp, Artificial Sequence
  Synthetic
gtgcaaagcatccacatttt

SEQ ID NO: 40578 - DNA, 20 bp, Artificial Sequence
  Synthetic
tgtgcaaagcatccacattt

SEQ ID NO: 40579 - DNA, 20 bp, Artificial Sequence
  Synthetic
tgtggatgctttgcacacca

SEQ ID NO: 40580 - DNA, 20 bp, Artificial Sequence
  Synthetic
ggatgctttgcacaccaagg

SEQ ID NO: 40581 - DNA, 20 bp, Artificial Sequence
  Synthetic
gatgctttgcacaccaaggc

SEQ ID NO: 40582 - DNA, 20 bp, Artificial Sequence
  Synthetic
atgctttgcacaccaaggcg

SEQ ID NO: 40583 - DNA, 20 bp, Artificial Sequence
  Synthetic
tgcacaccaaggcggggagt

SEQ ID NO: 40584 - DNA, 20 bp, Artificial Sequence
  Synthetic
caggcgccgactccccgcct

SEQ ID NO: 40585 - DNA, 20 bp, Artificial Sequence
  Synthetic
cggcgcctgacagagctcca

SEQ ID NO: 40586 - DNA, 20 bp, Artificial Sequence
  Synthetic
tgcatccgtggagctctgtc

SEQ ID NO: 40587 - DNA, 20 bp, Artificial Sequence
  Synthetic
gacagagctccacggatgca

SEQ ID NO: 40588 - DNA, 20 bp, Artificial Sequence
  Synthetic
agctccacggatgcatggac

SEQ ID NO: 40589 - DNA, 20 bp, Artificial Sequence
  Synthetic
tgcacctgtccatgcatccg

SEQ ID NO: 40590 - DNA, 20 bp, Artificial Sequence
  Synthetic
tggttccagggtcctgtgct

SEQ ID NO: 40591 - DNA, 20 bp, Artificial Sequence
  Synthetic
acaatccaagcacaggaccc

SEQ ID NO: 40592 - DNA, 20 bp, Artificial Sequence
  Synthetic
agggtcctgtgcttggattg

SEQ ID NO: 40593 - DNA, 20 bp, Artificial Sequence
  Synthetic
gggtcctgtgcttggattgt

SEQ ID NO: 40594 - DNA, 20 bp, Artificial Sequence
  Synthetic
ggtcctgtgcttggattgtg

SEQ ID NO: 40595 - DNA, 20 bp, Artificial Sequence
  Synthetic
gttccccacaatccaagcac

SEQ ID NO: 40596 - DNA, 20 bp, Artificial Sequence
  Synthetic
attgtggggaacagactccc

SEQ ID NO: 40597 - DNA, 20 bp, Artificial Sequence
  Synthetic
ttgtggggaacagactcccc

SEQ ID NO: 40598 - DNA, 20 bp, Artificial Sequence
  Synthetic
tgtggggaacagactccccg

SEQ ID NO: 40599 - DNA, 20 bp, Artificial Sequence
  Synthetic
gtggggaacagactccccgg

SEQ ID NO: 40600 - DNA, 20 bp, Artificial Sequence
  Synthetic
tggggaacagactccccggg

SEQ ID NO: 40601 - DNA, 20 bp, Artificial Sequence
  Synthetic
cgctcttgcagcaccccccg

SEQ ID NO: 40602 - DNA, 20 bp, Artificial Sequence
  Synthetic
acgctcttgcagcacccccc

SEQ ID NO: 40603 - DNA, 20 bp, Artificial Sequence
  Synthetic
aacgctcttgcagcaccccc

SEQ ID NO: 40604 - DNA, 20 bp, Artificial Sequence
  Synthetic
tccaagtcctgaaccccacc

SEQ ID NO: 40605 - DNA, 20 bp, Artificial Sequence
  Synthetic
tccaggtggggttcaggact

SEQ ID NO: 40606 - DNA, 20 bp, Artificial Sequence
  Synthetic
cagcactccaggtggggttc

SEQ ID NO: 40607 - DNA, 20 bp, Artificial Sequence
  Synthetic
gaaccccacctggagtgctg

SEQ ID NO: 40608 - DNA, 20 bp, Artificial Sequence
  Synthetic
gggcctcagcactccaggtg

SEQ ID NO: 40609 - DNA, 20 bp, Artificial Sequence
  Synthetic
tgggcctcagcactccaggt

SEQ ID NO: 40610 - DNA, 20 bp, Artificial Sequence
  Synthetic
atgggcctcagcactccagg

SEQ ID NO: 40611 - DNA, 20 bp, Artificial Sequence
  Synthetic
acctggagtgctgaggccca

SEQ ID NO: 40612 - DNA, 20 bp, Artificial Sequence
  Synthetic
gccatgggcctcagcactcc

SEQ ID NO: 40613 - DNA, 20 bp, Artificial Sequence
  Synthetic
gagtgctgaggcccatggcc

SEQ ID NO: 40614 - DNA, 20 bp, Artificial Sequence
  Synthetic
gcccatggcctggctcctga

SEQ ID NO: 40615 - DNA, 20 bp, Artificial Sequence
  Synthetic
accatcaggagccaggccat

SEQ ID NO: 40616 - DNA, 20 bp, Artificial Sequence
  Synthetic
caccatcaggagccaggcca

SEQ ID NO: 40617 - DNA, 20 bp, Artificial Sequence
  Synthetic
agacgtcaccatcaggagcc

SEQ ID NO: 40618 - DNA, 20 bp, Artificial Sequence
  Synthetic
gagagaaagacgtcaccatc

SEQ ID NO: 40619 - DNA, 20 bp, Artificial Sequence
  Synthetic
tggtgacgtctttctctcag

SEQ ID NO: 40620 - DNA, 20 bp, Artificial Sequence
  Synthetic
ttctctcagaggagcaagtc

SEQ ID NO: 40621 - DNA, 20 bp, Artificial Sequence
  Synthetic
ggagcaagtccggagctttc

SEQ ID NO: 40622 - DNA, 20 bp, Artificial Sequence
  Synthetic
aggttgggacctgaaagctc

SEQ ID NO: 40623 - DNA, 20 bp, Artificial Sequence
  Synthetic
gtcccaacctgcgttcaatg

SEQ ID NO: 40624 - DNA, 20 bp, Artificial Sequence
  Synthetic
ctccacattgaacgcaggtt

SEQ ID NO: 40625 - DNA, 20 bp, Artificial Sequence
  Synthetic
cctccacattgaacgcaggt

SEQ ID NO: 40626 - DNA, 20 bp, Artificial Sequence
  Synthetic
ccaacctgcgttcaatgtgg

SEQ ID NO: 40627 - DNA, 20 bp, Artificial Sequence
  Synthetic
atggcctccacattgaacgc

SEQ ID NO: 40628 - DNA, 20 bp, Artificial Sequence
  Synthetic
aaacgacatctggtttcaga

SEQ ID NO: 40629 - DNA, 20 bp, Artificial Sequence
  Synthetic
aaaccagatgtcgttttctt

SEQ ID NO: 40630 - DNA, 20 bp, Artificial Sequence
  Synthetic
aaccagatgtcgttttcttc

SEQ ID NO: 40631 - DNA, 20 bp, Artificial Sequence
  Synthetic
accagatgtcgttttcttcg

SEQ ID NO: 40632 - DNA, 20 bp, Artificial Sequence
  Synthetic
tccccgaagaaaacgacatc

SEQ ID NO: 40633 - DNA, 20 bp, Artificial Sequence
  Synthetic
ggacacagtgaaccctgaca

SEQ ID NO: 40634 - DNA, 20 bp, Artificial Sequence
  Synthetic
gcacaaaatcaaccttgtca

SEQ ID NO: 40635 - DNA, 20 bp, Artificial Sequence
  Synthetic
tgcacaaaatcaaccttgtc

SEQ ID NO: 40636 - DNA, 20 bp, Artificial Sequence
  Synthetic
aaaagaagccgactccctct

SEQ ID NO: 40637 - DNA, 20 bp, Artificial Sequence
  Synthetic
agaagccgactccctcttgg

SEQ ID NO: 40638 - DNA, 20 bp, Artificial Sequence
  Synthetic
agccgactccctcttggtgg

SEQ ID NO: 40639 - DNA, 20 bp, Artificial Sequence
  Synthetic
gccgactccctcttggtggt

SEQ ID NO: 40640 - DNA, 20 bp, Artificial Sequence
  Synthetic
tcccaccaccaagagggagt

SEQ ID NO: 40641 - DNA, 20 bp, Artificial Sequence
  Synthetic
ggatgatcccaccaccaaga

SEQ ID NO: 40642 - DNA, 20 bp, Artificial Sequence
  Synthetic
aggatgatcccaccaccaag

SEQ ID NO: 40643 - DNA, 20 bp, Artificial Sequence
  Synthetic
ggtggtgggatcatccttgc

SEQ ID NO: 40644 - DNA, 20 bp, Artificial Sequence
  Synthetic
tgccaagtcagatacctgca

SEQ ID NO: 40645 - DNA, 20 bp, Artificial Sequence
  Synthetic
ttctccgtgcaggtatactc

SEQ ID NO: 40646 - DNA, 20 bp, Artificial Sequence
  Synthetic
atagtcatcatctcaggagc

SEQ ID NO: 40647 - DNA, 20 bp, Artificial Sequence
  Synthetic
gctggtgttagtgcagaaag

SEQ ID NO: 40648 - DNA, 20 bp, Artificial Sequence
  Synthetic
agtggtgttccgaccttcag

SEQ ID NO: 40649 - DNA, 20 bp, Artificial Sequence
  Synthetic
gttccgaccttcagaggagc

SEQ ID NO: 40650 - DNA, 20 bp, Artificial Sequence
  Synthetic
cctccagctcctctgaaggt

SEQ ID NO: 40651 - DNA, 20 bp, Artificial Sequence
  Synthetic
ccgaccttcagaggagctgg

SEQ ID NO: 40652 - DNA, 20 bp, Artificial Sequence
  Synthetic
ataacctccagctcctctga

SEQ ID NO: 40653 - DNA, 20 bp, Artificial Sequence
  Synthetic
tcagaggagctggaggttat

SEQ ID NO: 40654 - DNA, 20 bp, Artificial Sequence
  Synthetic
ctggaggttattggagaaaa

SEQ ID NO: 40655 - DNA, 20 bp, Artificial Sequence
  Synthetic
ttggagaaaatggcaagccc

SEQ ID NO: 40656 - DNA, 20 bp, Artificial Sequence
  Synthetic
cctctcccactcccaggacc

SEQ ID NO: 40657 - DNA, 20 bp, Artificial Sequence
  Synthetic
ccaggggagtcgccaggtcc

SEQ ID NO: 40658 - DNA, 20 bp, Artificial Sequence
  Synthetic
ccaggacctggcgactcccc

SEQ ID NO: 40659 - DNA, 20 bp, Artificial Sequence
  Synthetic
caaaggccaggggagtcgcc

SEQ ID NO: 40660 - DNA, 20 bp, Artificial Sequence
  Synthetic
gggttgtgggcaaaggccag

SEQ ID NO: 40661 - DNA, 20 bp, Artificial Sequence
  Synthetic
cgggttgtgggcaaaggcca

SEQ ID NO: 40662 - DNA, 20 bp, Artificial Sequence
  Synthetic
acgggttgtgggcaaaggcc

SEQ ID NO: 40663 - DNA, 20 bp, Artificial Sequence
  Synthetic
ccgggacgggttgtgggcaa

SEQ ID NO: 40664 - DNA, 20 bp, Artificial Sequence
  Synthetic
cctttgcccacaacccgtcc

SEQ ID NO: 40665 - DNA, 20 bp, Artificial Sequence
  Synthetic
ctttgcccacaacccgtccc

SEQ ID NO: 40666 - DNA, 20 bp, Artificial Sequence
  Synthetic
ccacacccgggacgggttgt

SEQ ID NO: 40667 - DNA, 20 bp, Artificial Sequence
  Synthetic
cccacaacccgtcccgggtg

SEQ ID NO: 40668 - DNA, 20 bp, Artificial Sequence
  Synthetic
cccacacccgggacgggttg

SEQ ID NO: 40669 - DNA, 20 bp, Artificial Sequence
  Synthetic
ccacaacccgtcccgggtgt

SEQ ID NO: 40670 - DNA, 20 bp, Artificial Sequence
  Synthetic
agaactcccacacccgggac

SEQ ID NO: 40671 - DNA, 20 bp, Artificial Sequence
  Synthetic
tagaactcccacacccggga

SEQ ID NO: 40672 - DNA, 20 bp, Artificial Sequence
  Synthetic
gtggtagaactcccacaccc

SEQ ID NO: 40673 - DNA, 20 bp, Artificial Sequence
  Synthetic
agtggtagaactcccacacc

SEQ ID NO: 40674 - DNA, 20 bp, Artificial Sequence
  Synthetic
tgtgggagttctaccactac

SEQ ID NO: 40675 - DNA, 20 bp, Artificial Sequence
  Synthetic
gggagttctaccactaccgg

SEQ ID NO: 40676 - DNA, 20 bp, Artificial Sequence
  Synthetic
ggagttctaccactaccggc

SEQ ID NO: 40677 - DNA, 20 bp, Artificial Sequence
  Synthetic
gttctaccactaccggcggg

SEQ ID NO: 40678 - DNA, 20 bp, Artificial Sequence
  Synthetic
ccatgacctcccgccggtag

SEQ ID NO: 40679 - DNA, 20 bp, Artificial Sequence
  Synthetic
ccactaccggcgggaggtca

SEQ ID NO: 40680 - DNA, 20 bp, Artificial Sequence
  Synthetic
cactaccggcgggaggtcat

SEQ ID NO: 40681 - DNA, 20 bp, Artificial Sequence
  Synthetic
actaccggcgggaggtcatg

SEQ ID NO: 40682 - DNA, 20 bp, Artificial Sequence
  Synthetic
tgctccccatgacctcccgc

SEQ ID NO: 40683 - DNA, 20 bp, Artificial Sequence
  Synthetic
gcgggaggtcatggggagca

SEQ ID NO: 40684 - DNA, 20 bp, Artificial Sequence
  Synthetic
gggagcaaggagcccaacgc

SEQ ID NO: 40685 - DNA, 20 bp, Artificial Sequence
  Synthetic
ggagcaaggagcccaacgcc

SEQ ID NO: 40686 - DNA, 20 bp, Artificial Sequence
  Synthetic
atggcgcggtgcccggcgtt

SEQ ID NO: 40687 - DNA, 20 bp, Artificial Sequence
  Synthetic
tatggcgcggtgcccggcgt

SEQ ID NO: 40688 - DNA, 20 bp, Artificial Sequence
  Synthetic
ctcggctatggcgcggtgcc

SEQ ID NO: 40689 - DNA, 20 bp, Artificial Sequence
  Synthetic
tctcacactcggctatggcg

SEQ ID NO: 40690 - DNA, 20 bp, Artificial Sequence
  Synthetic
ccgggtctcacactcggcta

SEQ ID NO: 40691 - DNA, 20 bp, Artificial Sequence
  Synthetic
ccatagccgagtgtgagacc

SEQ ID NO: 40692 - DNA, 20 bp, Artificial Sequence
  Synthetic
agccgagtgtgagacccggc

SEQ ID NO: 40693 - DNA, 20 bp, Artificial Sequence
  Synthetic
gccgagtgtgagacccggct

SEQ ID NO: 40694 - DNA, 20 bp, Artificial Sequence
  Synthetic
gcccagccgggtctcacact

SEQ ID NO: 40695 - DNA, 20 bp, Artificial Sequence
  Synthetic
tgagacccggctgggcaagc

SEQ ID NO: 40696 - DNA, 20 bp, Artificial Sequence
  Synthetic
gagacccggctgggcaagca

SEQ ID NO: 40697 - DNA, 20 bp, Artificial Sequence
  Synthetic
ccggccctgcttgcccagcc

SEQ ID NO: 40698 - DNA, 20 bp, Artificial Sequence
  Synthetic
cccggctgggcaagcagggc

SEQ ID NO: 40699 - DNA, 20 bp, Artificial Sequence
  Synthetic
gccggccctgcttgcccagc

SEQ ID NO: 40700 - DNA, 20 bp, Artificial Sequence
  Synthetic
caagcagggccggcgagtcg

SEQ ID NO: 40701 - DNA, 20 bp, Artificial Sequence
  Synthetic
gggtgatgaccacgactcgc

SEQ ID NO: 40702 - DNA, 20 bp, Artificial Sequence
  Synthetic
gtgcagctcatcgatgttct

SEQ ID NO: 40703 - DNA, 20 bp, Artificial Sequence
  Synthetic
ggtgcagctcatcgatgttc

SEQ ID NO: 40704 - DNA, 20 bp, Artificial Sequence
  Synthetic
catcgatgagctgcaccgca

SEQ ID NO: 40705 - DNA, 20 bp, Artificial Sequence
  Synthetic
gatgagctgcaccgcaaggc

SEQ ID NO: 40706 - DNA, 20 bp, Artificial Sequence
  Synthetic
ggttcttggtgccagccttg

SEQ ID NO: 40707 - DNA, 20 bp, Artificial Sequence
  Synthetic
ggctggcaccaagaaccttc

SEQ ID NO: 40708 - DNA, 20 bp, Artificial Sequence
  Synthetic
atggatctccagaaggttct

SEQ ID NO: 40709 - DNA, 20 bp, Artificial Sequence
  Synthetic
aagaaccttctggagatcca

SEQ ID NO: 40710 - DNA, 20 bp, Artificial Sequence
  Synthetic
tctcaccatggatctccaga

SEQ ID NO: 40711 - DNA, 20 bp, Artificial Sequence
  Synthetic
aaaactcgatgtacctcttg

SEQ ID NO: 40712 - DNA, 20 bp, Artificial Sequence
  Synthetic
atgtacctcttgtggagttg

SEQ ID NO: 40713 - DNA, 20 bp, Artificial Sequence
  Synthetic
ctcagccacaactccacaag

SEQ ID NO: 40714 - DNA, 20 bp, Artificial Sequence
  Synthetic
cctgataaagctggacaaat

SEQ ID NO: 40715 - DNA, 20 bp, Artificial Sequence
  Synthetic
ccaatttgtccagctttatc

SEQ ID NO: 40716 - DNA, 20 bp, Artificial Sequence
  Synthetic
tgtccagctttatcaggaaa

SEQ ID NO: 40717 - DNA, 20 bp, Artificial Sequence
  Synthetic
gtccagctttatcaggaaaa

SEQ ID NO: 40718 - DNA, 20 bp, Artificial Sequence
  Synthetic
tacccttttcctgataaagc

SEQ ID NO: 40719 - DNA, 20 bp, Artificial Sequence
  Synthetic
tacttcagtgctccagaacc

SEQ ID NO: 40720 - DNA, 20 bp, Artificial Sequence
  Synthetic
gcatcttgagttccaggttc

SEQ ID NO: 40721 - DNA, 20 bp, Artificial Sequence
  Synthetic
atgctggcatcttgagttcc

SEQ ID NO: 40722 - DNA, 20 bp, Artificial Sequence
  Synthetic
aagtttctcaactgggatgc

SEQ ID NO: 40723 - DNA, 20 bp, Artificial Sequence
  Synthetic
tcccagttgagaaacttccc

SEQ ID NO: 40724 - DNA, 20 bp, Artificial Sequence
  Synthetic
accggggaagtttctcaact

SEQ ID NO: 40725 - DNA, 20 bp, Artificial Sequence
  Synthetic
taccggggaagtttctcaac

SEQ ID NO: 40726 - DNA, 20 bp, Artificial Sequence
  Synthetic
agttgagaaacttccccggt

SEQ ID NO: 40727 - DNA, 20 bp, Artificial Sequence
  Synthetic
ccattcttccaggtgtgaag

SEQ ID NO: 40728 - DNA, 20 bp, Artificial Sequence
  Synthetic
tcttccaggtgtgaagaggc

SEQ ID NO: 40729 - DNA, 20 bp, Artificial Sequence
  Synthetic
gcagcctgcctcttcacacc

SEQ ID NO: 40730 - DNA, 20 bp, Artificial Sequence
  Synthetic
aggtgtgaagaggcaggctg

SEQ ID NO: 40731 - DNA, 20 bp, Artificial Sequence
  Synthetic
ggtgtgaagaggcaggctgc

SEQ ID NO: 40732 - DNA, 20 bp, Artificial Sequence
  Synthetic
gtgtgaagaggcaggctgcg

SEQ ID NO: 40733 - DNA, 20 bp, Artificial Sequence
  Synthetic
tgtgaagaggcaggctgcgg

SEQ ID NO: 40734 - DNA, 20 bp, Artificial Sequence
  Synthetic
tgctgcgacctcacgtcgtg

SEQ ID NO: 40735 - DNA, 20 bp, Artificial Sequence
  Synthetic
cgacctcacgtcgtgtggtt

SEQ ID NO: 40736 - DNA, 20 bp, Artificial Sequence
  Synthetic
tctccaaaccacacgacgtg

SEQ ID NO: 40737 - DNA, 20 bp, Artificial Sequence
  Synthetic
cgtgtggtttggagaaaacc

SEQ ID NO: 40738 - DNA, 20 bp, Artificial Sequence
  Synthetic
aaacctggatcctgccattc

SEQ ID NO: 40739 - DNA, 20 bp, Artificial Sequence
  Synthetic
cctccagaatggcaggatcc

SEQ ID NO: 40740 - DNA, 20 bp, Artificial Sequence
  Synthetic
cctggatcctgccattctgg

SEQ ID NO: 40741 - DNA, 20 bp, Artificial Sequence
  Synthetic
ggatcctgccattctggagg

SEQ ID NO: 40742 - DNA, 20 bp, Artificial Sequence
  Synthetic
tcaacctcctccagaatggc

SEQ ID NO: 40743 - DNA, 20 bp, Artificial Sequence
  Synthetic
tctgtcaacctcctccagaa

SEQ ID NO: 40744 - DNA, 20 bp, Artificial Sequence
  Synthetic
cactagacataaatcacagt

SEQ ID NO: 40745 - DNA, 20 bp, Artificial Sequence
  Synthetic
ccactagacataaatcacag

SEQ ID NO: 40746 - DNA, 20 bp, Artificial Sequence
  Synthetic
ccactgtgatttatgtctag

SEQ ID NO: 40747 - DNA, 20 bp, Artificial Sequence
  Synthetic
ctgtgatttatgtctagtgg

SEQ ID NO: 40748 - DNA, 20 bp, Artificial Sequence
  Synthetic
tgtgatttatgtctagtggt

SEQ ID NO: 40749 - DNA, 20 bp, Artificial Sequence
  Synthetic
gtaggtgggcacttcctctg

SEQ ID NO: 40750 - DNA, 20 bp, Artificial Sequence
  Synthetic
ggctgctgggtacaccacag

SEQ ID NO: 40751 - DNA, 20 bp, Artificial Sequence
  Synthetic
acaccacctttgagagcgcg

SEQ ID NO: 40752 - DNA, 20 bp, Artificial Sequence
  Synthetic
gggccgcgcgctctcaaagg

SEQ ID NO: 40753 - DNA, 20 bp, Artificial Sequence
  Synthetic
cgtgggccgcgcgctctcaa

SEQ ID NO: 40754 - DNA, 20 bp, Artificial Sequence
  Synthetic
gcggcccacgcagacccaca

SEQ ID NO: 40755 - DNA, 20 bp, Artificial Sequence
  Synthetic
agcgccatgtgggtctgcgt

SEQ ID NO: 40756 - DNA, 20 bp, Artificial Sequence
  Synthetic
cagcgccatgtgggtctgcg

SEQ ID NO: 40757 - DNA, 20 bp, Artificial Sequence
  Synthetic
cacgcagacccacatggcgc

SEQ ID NO: 40758 - DNA, 20 bp, Artificial Sequence
  Synthetic
cagctgcaccagcgccatgt

SEQ ID NO: 40759 - DNA, 20 bp, Artificial Sequence
  Synthetic
ccagctgcaccagcgccatg

SEQ ID NO: 40760 - DNA, 20 bp, Artificial Sequence
  Synthetic
ccacatggcgctggtgcagc

SEQ ID NO: 40761 - DNA, 20 bp, Artificial Sequence
  Synthetic
gctggtgcagctggagcgcg

SEQ ID NO: 40762 - DNA, 20 bp, Artificial Sequence
  Synthetic
ctggtgcagctggagcgcgt

SEQ ID NO: 40763 - DNA, 20 bp, Artificial Sequence
  Synthetic
cgtgggcctcctccgcttcc

SEQ ID NO: 40764 - DNA, 20 bp, Artificial Sequence
  Synthetic
ggctgaccaggaagcggagg

SEQ ID NO: 40765 - DNA, 20 bp, Artificial Sequence
  Synthetic
tctggctgaccaggaagcgg

SEQ ID NO: 40766 - DNA, 20 bp, Artificial Sequence
  Synthetic
cgttctggctgaccaggaag

SEQ ID NO: 40767 - DNA, 20 bp, Artificial Sequence
  Synthetic
cttcctggtcagccagaacg

SEQ ID NO: 40768 - DNA, 20 bp, Artificial Sequence
  Synthetic
cgtccacgttctggctgacc

SEQ ID NO: 40769 - DNA, 20 bp, Artificial Sequence
  Synthetic
ctggtcagccagaacgtgga

SEQ ID NO: 40770 - DNA, 20 bp, Artificial Sequence
  Synthetic
tggtcagccagaacgtggac

SEQ ID NO: 40771 - DNA, 20 bp, Artificial Sequence
  Synthetic
catggagcccgtccacgttc

SEQ ID NO: 40772 - DNA, 20 bp, Artificial Sequence
  Synthetic
gacgggctccatgtgcgctc

SEQ ID NO: 40773 - DNA, 20 bp, Artificial Sequence
  Synthetic
tggggaagcctgagcgcaca

SEQ ID NO: 40774 - DNA, 20 bp, Artificial Sequence
  Synthetic
atgtgcgctcaggcttcccc

SEQ ID NO: 40775 - DNA, 20 bp, Artificial Sequence
  Synthetic
cggggccagggtgttacctg

SEQ ID NO: 40776 - DNA, 20 bp, Artificial Sequence
  Synthetic
ctcttcccacagggacaaac

SEQ ID NO: 40777 - DNA, 20 bp, Artificial Sequence
  Synthetic
gacaaactggcagagctcca

SEQ ID NO: 40778 - DNA, 20 bp, Artificial Sequence
  Synthetic
acaaactggcagagctccac

SEQ ID NO: 40779 - DNA, 20 bp, Artificial Sequence
  Synthetic
gctccacgggaacatgtttg

SEQ ID NO: 40780 - DNA, 20 bp, Artificial Sequence
  Synthetic
cttccacaaacatgttcccg

SEQ ID NO: 40781 - DNA, 20 bp, Artificial Sequence
  Synthetic
tggcactcacgtcttacact

SEQ ID NO: 40782 - DNA, 20 bp, Artificial Sequence
  Synthetic
gtacgtccgagacacagtcg

SEQ ID NO: 40783 - DNA, 20 bp, Artificial Sequence
  Synthetic
tacgtccgagacacagtcgt

SEQ ID NO: 40784 - DNA, 20 bp, Artificial Sequence
  Synthetic
tggtgcccacgactgtgtct

SEQ ID NO: 40785 - DNA, 20 bp, Artificial Sequence
  Synthetic
agacacagtcgtgggcacca

SEQ ID NO: 40786 - DNA, 20 bp, Artificial Sequence
  Synthetic
gacacagtcgtgggcaccat

SEQ ID NO: 40787 - DNA, 20 bp, Artificial Sequence
  Synthetic
cgtgggcaccatgggcctga

SEQ ID NO: 40788 - DNA, 20 bp, Artificial Sequence
  Synthetic
caccatgggcctgaaggcca

SEQ ID NO: 40789 - DNA, 20 bp, Artificial Sequence
  Synthetic
accatgggcctgaaggccac

SEQ ID NO: 40790 - DNA, 20 bp, Artificial Sequence
  Synthetic
gcccgtggccttcaggccca

SEQ ID NO: 40791 - DNA, 20 bp, Artificial Sequence
  Synthetic
tgggcctgaaggccacgggc

SEQ ID NO: 40792 - DNA, 20 bp, Artificial Sequence
  Synthetic
agagccggcccgtggccttc

SEQ ID NO: 40793 - DNA, 20 bp, Artificial Sequence
  Synthetic
cacggtgcagagccggcccg

SEQ ID NO: 40794 - DNA, 20 bp, Artificial Sequence
  Synthetic
cacgggccggctctgcaccg

SEQ ID NO: 40795 - DNA, 20 bp, Artificial Sequence
  Synthetic
ccttagccacggtgcagagc

SEQ ID NO: 40796 - DNA, 20 bp, Artificial Sequence
  Synthetic
ccggctctgcaccgtggcta

SEQ ID NO: 40797 - DNA, 20 bp, Artificial Sequence
  Synthetic
tctgcaccgtggctaaggca

SEQ ID NO: 40798 - DNA, 20 bp, Artificial Sequence
  Synthetic
ctgcaccgtggctaaggcaa

SEQ ID NO: 40799 - DNA, 20 bp, Artificial Sequence
  Synthetic
tgcaccgtggctaaggcaag

SEQ ID NO: 40800 - DNA, 20 bp, Artificial Sequence
  Synthetic
gcaccgtggctaaggcaagg

SEQ ID NO: 40801 - DNA, 20 bp, Artificial Sequence
  Synthetic
cagcccccttgccttagcca

SEQ ID NO: 40802 - DNA, 20 bp, Artificial Sequence
  Synthetic
caagggggctgcgagcctgc

SEQ ID NO: 40803 - DNA, 20 bp, Artificial Sequence
  Synthetic
ggtgggggtggctcacctgc

SEQ ID NO: 40804 - DNA, 20 bp, Artificial Sequence
  Synthetic
ctcattgcaggggagagctg

SEQ ID NO: 40805 - DNA, 20 bp, Artificial Sequence
  Synthetic
tcattgcaggggagagctga

SEQ ID NO: 40806 - DNA, 20 bp, Artificial Sequence
  Synthetic
tgagggacaccatcctagac

SEQ ID NO: 40807 - DNA, 20 bp, Artificial Sequence
  Synthetic
gagggacaccatcctagact

SEQ ID NO: 40808 - DNA, 20 bp, Artificial Sequence
  Synthetic
ggacaccatcctagactggg

SEQ ID NO: 40809 - DNA, 20 bp, Artificial Sequence
  Synthetic
ggagtcctcccagtctagga

SEQ ID NO: 40810 - DNA, 20 bp, Artificial Sequence
  Synthetic
gcagggagtcctcccagtct

SEQ ID NO: 40811 - DNA, 20 bp, Artificial Sequence
  Synthetic
gggaggactccctgcccgac

SEQ ID NO: 40812 - DNA, 20 bp, Artificial Sequence
  Synthetic
ggaggactccctgcccgacc

SEQ ID NO: 40813 - DNA, 20 bp, Artificial Sequence
  Synthetic
ctccctgcccgaccgggacc

SEQ ID NO: 40814 - DNA, 20 bp, Artificial Sequence
  Synthetic
tgccaggtcccggtcgggca

SEQ ID NO: 40815 - DNA, 20 bp, Artificial Sequence
  Synthetic
gtgccaggtcccggtcgggc

SEQ ID NO: 40816 - DNA, 20 bp, Artificial Sequence
  Synthetic
gcgagtgccaggtcccggtc

SEQ ID NO: 40817 - DNA, 20 bp, Artificial Sequence
  Synthetic
ggcgagtgccaggtcccggt

SEQ ID NO: 40818 - DNA, 20 bp, Artificial Sequence
  Synthetic
catcggcgagtgccaggtcc

SEQ ID NO: 40819 - DNA, 20 bp, Artificial Sequence
  Synthetic
ggacctggcactcgccgatg

SEQ ID NO: 40820 - DNA, 20 bp, Artificial Sequence
  Synthetic
tggcctcatcggcgagtgcc

SEQ ID NO: 40821 - DNA, 20 bp, Artificial Sequence
  Synthetic
cactcgccgatgaggccagc

SEQ ID NO: 40822 - DNA, 20 bp, Artificial Sequence
  Synthetic
gtcagacctgctggcctcat

SEQ ID NO: 40823 - DNA, 20 bp, Artificial Sequence
  Synthetic
gggtggggggtcagacctgc

SEQ ID NO: 40824 - DNA, 20 bp, Artificial Sequence
  Synthetic
gatggacaggtcggcgttcc

SEQ ID NO: 40825 - DNA, 20 bp, Artificial Sequence
  Synthetic
cgccgacctgtccatcacgc

SEQ ID NO: 40826 - DNA, 20 bp, Artificial Sequence
  Synthetic
gccgacctgtccatcacgct

SEQ ID NO: 40827 - DNA, 20 bp, Artificial Sequence
  Synthetic
acccagcgtgatggacaggt

SEQ ID NO: 40828 - DNA, 20 bp, Artificial Sequence
  Synthetic
atgtacccagcgtgatggac

SEQ ID NO: 40829 - DNA, 20 bp, Artificial Sequence
  Synthetic
cagcgatgtacccagcgtga

SEQ ID NO: 40830 - DNA, 20 bp, Artificial Sequence
  Synthetic
tgggtacatcgctgcagatc

SEQ ID NO: 40831 - DNA, 20 bp, Artificial Sequence
  Synthetic
tcgctgcagatccggcccag

SEQ ID NO: 40832 - DNA, 20 bp, Artificial Sequence
  Synthetic
gcggcaggttcccgctgggc

SEQ ID NO: 40833 - DNA, 20 bp, Artificial Sequence
  Synthetic
gtggtgttccacacgggtgc

SEQ ID NO: 40834 - DNA, 20 bp, Artificial Sequence
  Synthetic
gccggcatcagcactgcctc

SEQ ID NO: 40835 - DNA, 20 bp, Artificial Sequence
  Synthetic
gccagaggcagtgctgatgc

SEQ ID NO: 40836 - DNA, 20 bp, Artificial Sequence
  Synthetic
cctgaagtcggggatgccag

SEQ ID NO: 40837 - DNA, 20 bp, Artificial Sequence
  Synthetic
cctctggcatccccgacttc

SEQ ID NO: 40838 - DNA, 20 bp, Artificial Sequence
  Synthetic
caatcacagacctgaagtcg

SEQ ID NO: 40839 - DNA, 20 bp, Artificial Sequence
  Synthetic
acaatcacagacctgaagtc

SEQ ID NO: 40840 - DNA, 20 bp, Artificial Sequence
  Synthetic
cacaatcacagacctgaagt

SEQ ID NO: 40841 - DNA, 20 bp, Artificial Sequence
  Synthetic
gccaccttcaggggtcccca

SEQ ID NO: 40842 - DNA, 20 bp, Artificial Sequence
  Synthetic
tcaggggtccccacggagtc

SEQ ID NO: 40843 - DNA, 20 bp, Artificial Sequence
  Synthetic
tccccacggagtctggacca

SEQ ID NO: 40844 - DNA, 20 bp, Artificial Sequence
  Synthetic
tccatggtccagactccgtg

SEQ ID NO: 40845 - DNA, 20 bp, Artificial Sequence
  Synthetic
ctccatggtccagactccgt

SEQ ID NO: 40846 - DNA, 20 bp, Artificial Sequence
  Synthetic
cctccatggtccagactccg

SEQ ID NO: 40847 - DNA, 20 bp, Artificial Sequence
  Synthetic
ccacggagtctggaccatgg

SEQ ID NO: 40848 - DNA, 20 bp, Artificial Sequence
  Synthetic
gtctggaccatggaggagcg

SEQ ID NO: 40849 - DNA, 20 bp, Artificial Sequence
  Synthetic
ggccagacctcgctcctcca

SEQ ID NO: 40850 - DNA, 20 bp, Artificial Sequence
  Synthetic
cagtgctgccgacctgagcg

SEQ ID NO: 40851 - DNA, 20 bp, Artificial Sequence
  Synthetic
gggttggctcggcctcgctc

SEQ ID NO: 40852 - DNA, 20 bp, Artificial Sequence
  Synthetic
catgtgggtgagggttggct

SEQ ID NO: 40853 - DNA, 20 bp, Artificial Sequence
  Synthetic
atgctcatgtgggtgagggt

SEQ ID NO: 40854 - DNA, 20 bp, Artificial Sequence
  Synthetic
ggtgatgctcatgtgggtga

SEQ ID NO: 40855 - DNA, 20 bp, Artificial Sequence
  Synthetic
gggtgatgctcatgtgggtg

SEQ ID NO: 40856 - DNA, 20 bp, Artificial Sequence
  Synthetic
cagacgggtgatgctcatgt

SEQ ID NO: 40857 - DNA, 20 bp, Artificial Sequence
  Synthetic
gcagacgggtgatgctcatg

SEQ ID NO: 40858 - DNA, 20 bp, Artificial Sequence
  Synthetic
cagcttctgctcatgcagac

SEQ ID NO: 40859 - DNA, 20 bp, Artificial Sequence
  Synthetic
ccagcttctgctcatgcaga

SEQ ID NO: 40860 - DNA, 20 bp, Artificial Sequence
  Synthetic
ccgtctgcatgagcagaagc

SEQ ID NO: 40861 - DNA, 20 bp, Artificial Sequence
  Synthetic
tgccttccaggtgcagcatg

SEQ ID NO: 40862 - DNA, 20 bp, Artificial Sequence
  Synthetic
gagacaccacatgctgcacc

SEQ ID NO: 40863 - DNA, 20 bp, Artificial Sequence
  Synthetic
gtggtgtctcagaactgtga

SEQ ID NO: 40864 - DNA, 20 bp, Artificial Sequence
  Synthetic
tggtgtctcagaactgtgac

SEQ ID NO: 40865 - DNA, 20 bp, Artificial Sequence
  Synthetic
actgtgacgggctccacctg

SEQ ID NO: 40866 - DNA, 20 bp, Artificial Sequence
  Synthetic
gacgggctccacctgaggag

SEQ ID NO: 40867 - DNA, 20 bp, Artificial Sequence
  Synthetic
acgggctccacctgaggagt

SEQ ID NO: 40868 - DNA, 20 bp, Artificial Sequence
  Synthetic
gcggcagcccactcctcagg

SEQ ID NO: 40869 - DNA, 20 bp, Artificial Sequence
  Synthetic
tgcgcggcagcccactcctc

SEQ ID NO: 40870 - DNA, 20 bp, Artificial Sequence
  Synthetic
gaggagtgggctgccgcgca

SEQ ID NO: 40871 - DNA, 20 bp, Artificial Sequence
  Synthetic
agctcggagatggccgtgcg

SEQ ID NO: 40872 - DNA, 20 bp, Artificial Sequence
  Synthetic
acggccatctccgagctcca

SEQ ID NO: 40873 - DNA, 20 bp, Artificial Sequence
  Synthetic
cggccatctccgagctccac

SEQ ID NO: 40874 - DNA, 20 bp, Artificial Sequence
  Synthetic
gttcccgtggagctcggaga

SEQ ID NO: 40875 - DNA, 20 bp, Artificial Sequence
  Synthetic
gtacatgttcccgtggagct

SEQ ID NO: 40876 - DNA, 20 bp, Artificial Sequence
  Synthetic
cttcaatgtacatgttcccg

SEQ ID NO: 40877 - DNA, 20 bp, Artificial Sequence
  Synthetic
gtacctcctgcgttcccaac

SEQ ID NO: 40878 - DNA, 20 bp, Artificial Sequence
  Synthetic
tacctcctgcgttcccaaca

SEQ ID NO: 40879 - DNA, 20 bp, Artificial Sequence
  Synthetic
ctccctgttgggaacgcagg

SEQ ID NO: 40880 - DNA, 20 bp, Artificial Sequence
  Synthetic
gtactccctgttgggaacgc

SEQ ID NO: 40881 - DNA, 20 bp, Artificial Sequence
  Synthetic
ttcccaacagggagtacgtg

SEQ ID NO: 40882 - DNA, 20 bp, Artificial Sequence
  Synthetic
tcccaacagggagtacgtgc

SEQ ID NO: 40883 - DNA, 20 bp, Artificial Sequence
  Synthetic
acccgcacgtactccctgtt

SEQ ID NO: 40884 - DNA, 20 bp, Artificial Sequence
  Synthetic
cacccgcacgtactccctgt

SEQ ID NO: 40885 - DNA, 20 bp, Artificial Sequence
  Synthetic
cgtgcgggtgttcgatgtga

SEQ ID NO: 40886 - DNA, 20 bp, Artificial Sequence
  Synthetic
gccctccacagacaccagac

SEQ ID NO: 40887 - DNA, 20 bp, Artificial Sequence
  Synthetic
gcctgtctggtgtctgtgga

SEQ ID NO: 40888 - DNA, 20 bp, Artificial Sequence
  Synthetic
ggcctgtctggtgtctgtgg

SEQ ID NO: 40889 - DNA, 20 bp, Artificial Sequence
  Synthetic
tccacagacaccagacaggc

SEQ ID NO: 40890 - DNA, 20 bp, Artificial Sequence
  Synthetic
tccggcctgtctggtgtctg

SEQ ID NO: 40891 - DNA, 20 bp, Artificial Sequence
  Synthetic
tgtggcaggtccggcctgtc

SEQ ID NO: 40892 - DNA, 20 bp, Artificial Sequence
  Synthetic
ggccggacctgccacaagtg

SEQ ID NO: 40893 - DNA, 20 bp, Artificial Sequence
  Synthetic
gccggacctgccacaagtgt

SEQ ID NO: 40894 - DNA, 20 bp, Artificial Sequence
  Synthetic
tcccacacttgtggcaggtc

SEQ ID NO: 40895 - DNA, 20 bp, Artificial Sequence
  Synthetic
ctgggtcccacacttgtggc

SEQ ID NO: 40896 - DNA, 20 bp, Artificial Sequence
  Synthetic
gcagctgggtcccacacttg

SEQ ID NO: 40897 - DNA, 20 bp, Artificial Sequence
  Synthetic
acaagtgtgggacccagctg

SEQ ID NO: 40898 - DNA, 20 bp, Artificial Sequence
  Synthetic
caagtgtgggacccagctgc

SEQ ID NO: 40899 - DNA, 20 bp, Artificial Sequence
  Synthetic
cacaatggtgtcccgcagct

SEQ ID NO: 40900 - DNA, 20 bp, Artificial Sequence
  Synthetic
gcacaatggtgtcccgcagc

SEQ ID NO: 40901 - DNA, 20 bp, Artificial Sequence
  Synthetic
cgggacaccattgtgcactt

SEQ ID NO: 40902 - DNA, 20 bp, Artificial Sequence
  Synthetic
gggacaccattgtgcacttt

SEQ ID NO: 40903 - DNA, 20 bp, Artificial Sequence
  Synthetic
ggacaccattgtgcactttg

SEQ ID NO: 40904 - DNA, 20 bp, Artificial Sequence
  Synthetic
cctctccccaaagtgcacaa

SEQ ID NO: 40905 - DNA, 20 bp, Artificial Sequence
  Synthetic
ccattgtgcactttggggag

SEQ ID NO: 40906 - DNA, 20 bp, Artificial Sequence
  Synthetic
cattgtgcactttggggaga

SEQ ID NO: 40907 - DNA, 20 bp, Artificial Sequence
  Synthetic
attgtgcactttggggagag

SEQ ID NO: 40908 - DNA, 20 bp, Artificial Sequence
  Synthetic
ttgtgcactttggggagagg

SEQ ID NO: 40909 - DNA, 20 bp, Artificial Sequence
  Synthetic
ctttggggagagggggacgt

SEQ ID NO: 40910 - DNA, 20 bp, Artificial Sequence
  Synthetic
tttggggagagggggacgtt

SEQ ID NO: 40911 - DNA, 20 bp, Artificial Sequence
  Synthetic
ttggggagagggggacgttg

SEQ ID NO: 40912 - DNA, 20 bp, Artificial Sequence
  Synthetic
cgttggggcagcctttgaac

SEQ ID NO: 40913 - DNA, 20 bp, Artificial Sequence
  Synthetic
gttggggcagcctttgaact

SEQ ID NO: 40914 - DNA, 20 bp, Artificial Sequence
  Synthetic
gcagcctttgaactgggaag

SEQ ID NO: 40915 - DNA, 20 bp, Artificial Sequence
  Synthetic
gtcgccgcttcccagttcaa

SEQ ID NO: 40916 - DNA, 20 bp, Artificial Sequence
  Synthetic
gaactgggaagcggcgaccg

SEQ ID NO: 40917 - DNA, 20 bp, Artificial Sequence
  Synthetic
gtctgctctgctggcagcct

SEQ ID NO: 40918 - DNA, 20 bp, Artificial Sequence
  Synthetic
caggatggtgtctgctctgc

SEQ ID NO: 40919 - DNA, 20 bp, Artificial Sequence
  Synthetic
gcagacaccatcctgtgtct

SEQ ID NO: 40920 - DNA, 20 bp, Artificial Sequence
  Synthetic
cagacaccatcctgtgtcta

SEQ ID NO: 40921 - DNA, 20 bp, Artificial Sequence
  Synthetic
gctggaccctagacacagga

SEQ ID NO: 40922 - DNA, 20 bp, Artificial Sequence
  Synthetic
tcaggctggaccctagacac

SEQ ID NO: 40923 - DNA, 20 bp, Artificial Sequence
  Synthetic
gtgtctagggtccagcctga

SEQ ID NO: 40924 - DNA, 20 bp, Artificial Sequence
  Synthetic
atcggcacgtaccttcaggc

SEQ ID NO: 40925 - DNA, 20 bp, Artificial Sequence
  Synthetic
tgtcatcggcacgtaccttc

SEQ ID NO: 40926 - DNA, 20 bp, Artificial Sequence
  Synthetic
cagatgaaagtgtcctaatg

SEQ ID NO: 40927 - DNA, 20 bp, Artificial Sequence
  Synthetic
tctgcttctgtctcctcatt

SEQ ID NO: 40928 - DNA, 20 bp, Artificial Sequence
  Synthetic
agacagaagcagatcaacta

SEQ ID NO: 40929 - DNA, 20 bp, Artificial Sequence
  Synthetic
gacagaagcagatcaactat

SEQ ID NO: 40930 - DNA, 20 bp, Artificial Sequence
  Synthetic
ttctttaatataacgatcgt

SEQ ID NO: 40931 - DNA, 20 bp, Artificial Sequence
  Synthetic
gttatattaaagaagtccca

SEQ ID NO: 40932 - DNA, 20 bp, Artificial Sequence
  Synthetic
cactgaaacaagactacctt

SEQ ID NO: 40933 - DNA, 20 bp, Artificial Sequence
  Synthetic
tgtagacaccttcgacaacc

SEQ ID NO: 40934 - DNA, 20 bp, Artificial Sequence
  Synthetic
gatgaatgccaggttgtcga

SEQ ID NO: 40935 - DNA, 20 bp, Artificial Sequence
  Synthetic
ggggtcttgggatgaatgcc

SEQ ID NO: 40936 - DNA, 20 bp, Artificial Sequence
  Synthetic
ttaaatttattaggggtctt

SEQ ID NO: 40937 - DNA, 20 bp, Artificial Sequence
  Synthetic
cttaaatttattaggggtct

SEQ ID NO: 40938 - DNA, 20 bp, Artificial Sequence
  Synthetic
atacttcttaaatttattag

SEQ ID NO: 40939 - DNA, 20 bp, Artificial Sequence
  Synthetic
tatacttcttaaatttatta

SEQ ID NO: 40940 - DNA, 20 bp, Artificial Sequence
  Synthetic
ctatacttcttaaatttatt

SEQ ID NO: 40941 - DNA, 20 bp, Artificial Sequence
  Synthetic
agaagtatagtcgacgttca

SEQ ID NO: 40942 - DNA, 20 bp, Artificial Sequence
  Synthetic
gaagtatagtcgacgttcat

SEQ ID NO: 40943 - DNA, 20 bp, Artificial Sequence
  Synthetic
gggaccagcaaatcaaactc

SEQ ID NO: 40944 - DNA, 20 bp, Artificial Sequence
  Synthetic
ccttccagagtttgatttgc

SEQ ID NO: 40945 - DNA, 20 bp, Artificial Sequence
  Synthetic
ccagcaaatcaaactctgga

SEQ ID NO: 40946 - DNA, 20 bp, Artificial Sequence
  Synthetic
gcaaatcaaactctggaagg

SEQ ID NO: 40947 - DNA, 20 bp, Artificial Sequence
  Synthetic
ggaaggtggctctgcatttt

SEQ ID NO: 40948 - DNA, 20 bp, Artificial Sequence
  Synthetic
gaaggtggctctgcattttt

SEQ ID NO: 40949 - DNA, 20 bp, Artificial Sequence
  Synthetic
gcatttttgggatcctccag

SEQ ID NO: 40950 - DNA, 20 bp, Artificial Sequence
  Synthetic
tcacatccttcttccgctgg

SEQ ID NO: 40951 - DNA, 20 bp, Artificial Sequence
  Synthetic
ctgagagattatcagattcg

SEQ ID NO: 40952 - DNA, 20 bp, Artificial Sequence
  Synthetic
atcagattcgaggactgaat

SEQ ID NO: 40953 - DNA, 20 bp, Artificial Sequence
  Synthetic
ttgatctctttatatgaaaa

SEQ ID NO: 40954 - DNA, 20 bp, Artificial Sequence
  Synthetic
ttatatgaaaatggagtcaa

SEQ ID NO: 40955 - DNA, 20 bp, Artificial Sequence
  Synthetic
aaatggagtcaatggcattt

SEQ ID NO: 40956 - DNA, 20 bp, Artificial Sequence
  Synthetic
tggcattttggctgatgaaa

SEQ ID NO: 40957 - DNA, 20 bp, Artificial Sequence
  Synthetic
gtgatgataatgcagggcct

SEQ ID NO: 40958 - DNA, 20 bp, Artificial Sequence
  Synthetic
tgatgataatgcagggcctt

SEQ ID NO: 40959 - DNA, 20 bp, Artificial Sequence
  Synthetic
ttgtttgtaaagttttccca

SEQ ID NO: 40960 - DNA, 20 bp, Artificial Sequence
  Synthetic
ttacaaacaattgctttgct

SEQ ID NO: 40961 - DNA, 20 bp, Artificial Sequence
  Synthetic
gaatatttcggtagtgtttc

SEQ ID NO: 40962 - DNA, 20 bp, Artificial Sequence
  Synthetic
aaacactaccgaaatattcc

SEQ ID NO: 40963 - DNA, 20 bp, Artificial Sequence
  Synthetic
tgtgaggtccaggaatattt

SEQ ID NO: 40964 - DNA, 20 bp, Artificial Sequence
  Synthetic
aaatattcctggacctcaca

SEQ ID NO: 40965 - DNA, 20 bp, Artificial Sequence
  Synthetic
actaaaaccatgtgaggtcc

SEQ ID NO: 40966 - DNA, 20 bp, Artificial Sequence
  Synthetic
tttggaactaaaaccatgtg

SEQ ID NO: 40967 - DNA, 20 bp, Artificial Sequence
  Synthetic
cagttgtgtaaagtagactt

SEQ ID NO: 40968 - DNA, 20 bp, Artificial Sequence
  Synthetic
caaagtctactttacacaac

SEQ ID NO: 40969 - DNA, 20 bp, Artificial Sequence
  Synthetic
ggatgaatgaatttaaacga

SEQ ID NO: 40970 - DNA, 20 bp, Artificial Sequence
  Synthetic
gatgaatgaatttaaacgat

SEQ ID NO: 40971 - DNA, 20 bp, Artificial Sequence
  Synthetic
aacaaatgacacggagagat

SEQ ID NO: 40972 - DNA, 20 bp, Artificial Sequence
  Synthetic
aaacaaatgacacggagaga

SEQ ID NO: 40973 - DNA, 20 bp, Artificial Sequence
  Synthetic
ctccgtgtcatttgttttgt

SEQ ID NO: 40974 - DNA, 20 bp, Artificial Sequence
  Synthetic
ctccgacaaaacaaatgaca

SEQ ID NO: 40975 - DNA, 20 bp, Artificial Sequence
  Synthetic
catttgttttgtcggagaca

SEQ ID NO: 40976 - DNA, 20 bp, Artificial Sequence
  Synthetic
attcgtgatgaaatgatgcc

SEQ ID NO: 40977 - DNA, 20 bp, Artificial Sequence
  Synthetic
atgaaatgatgccaggagag

SEQ ID NO: 40978 - DNA, 20 bp, Artificial Sequence
  Synthetic
tgaaatgatgccaggagagt

SEQ ID NO: 40979 - DNA, 20 bp, Artificial Sequence
  Synthetic
acgcaaacatcccactctcc

SEQ ID NO: 40980 - DNA, 20 bp, Artificial Sequence
  Synthetic
ttgcgttacttcttatgaga

SEQ ID NO: 40981 - DNA, 20 bp, Artificial Sequence
  Synthetic
ctgtattcaaaaagtttcac

SEQ ID NO: 40982 - DNA, 20 bp, Artificial Sequence
  Synthetic
aaagtttcactggcgatacc

SEQ ID NO: 40983 - DNA, 20 bp, Artificial Sequence
  Synthetic
tgtgagcttcatcaatgacc

SEQ ID NO: 40984 - DNA, 20 bp, Artificial Sequence
  Synthetic
aataaagaatgaaaaatcta

SEQ ID NO: 40985 - DNA, 20 bp, Artificial Sequence
  Synthetic
actaaccgcttgctcctaac

SEQ ID NO: 40986 - DNA, 20 bp, Artificial Sequence
  Synthetic
gtgttccagttaggagcaag

SEQ ID NO: 40987 - DNA, 20 bp, Artificial Sequence
  Synthetic
tctgcaaaggtgttccagtt

SEQ ID NO: 40988 - DNA, 20 bp, Artificial Sequence
  Synthetic
tcatgcaggttattctgcaa

SEQ ID NO: 40989 - DNA, 20 bp, Artificial Sequence
  Synthetic
agaataacctgcatgaactg

SEQ ID NO: 40990 - DNA, 20 bp, Artificial Sequence
  Synthetic
gaataacctgcatgaactgt

SEQ ID NO: 40991 - DNA, 20 bp, Artificial Sequence
  Synthetic
gtaaggcccacagttcatgc

SEQ ID NO: 40992 - DNA, 20 bp, Artificial Sequence
  Synthetic
aggcaataaaaagttgagta

SEQ ID NO: 40993 - DNA, 20 bp, Artificial Sequence
  Synthetic
tctgcagaattaaagacatc

SEQ ID NO: 40994 - DNA, 20 bp, Artificial Sequence
  Synthetic
ctctacaggactttgattct

SEQ ID NO: 40995 - DNA, 20 bp, Artificial Sequence
  Synthetic
tttgacactaaaaattgtct

SEQ ID NO: 40996 - DNA, 20 bp, Artificial Sequence
  Synthetic
tcttggtgatcaaaaactcg

SEQ ID NO: 40997 - DNA, 20 bp, Artificial Sequence
  Synthetic
tttatacggcgtaacaaaaa

SEQ ID NO: 40998 - DNA, 20 bp, Artificial Sequence
  Synthetic
tctctacatcagtttttata

SEQ ID NO: 40999 - DNA, 20 bp, Artificial Sequence
  Synthetic
gaagagtctgccacctaaaa

SEQ ID NO: 41000 - DNA, 20 bp, Artificial Sequence
  Synthetic
atctttatttcctttttagg

SEQ ID NO: 41001 - DNA, 20 bp, Artificial Sequence
  Synthetic
taaatctttatttccttttt

SEQ ID NO: 41002 - DNA, 20 bp, Artificial Sequence
  Synthetic
aaaggaaataaagatttact

SEQ ID NO: 41003 - DNA, 20 bp, Artificial Sequence
  Synthetic
aaggaaataaagatttactt

SEQ ID NO: 41004 - DNA, 20 bp, Artificial Sequence
  Synthetic
aggaaataaagatttacttg

SEQ ID NO: 41005 - DNA, 20 bp, Artificial Sequence
  Synthetic
tgagtaagatgcaacgagaa

SEQ ID NO: 41006 - DNA, 20 bp, Artificial Sequence
  Synthetic
aaacatcaatatctttcatc

SEQ ID NO: 41007 - DNA, 20 bp, Artificial Sequence
  Synthetic
attgatgttttaaactcttc

SEQ ID NO: 41008 - DNA, 20 bp, Artificial Sequence
  Synthetic
tttaaactcttctggcaaga

SEQ ID NO: 41009 - DNA, 20 bp, Artificial Sequence
  Synthetic
aatcatccatatctgtttga

SEQ ID NO: 41010 - DNA, 20 bp, Artificial Sequence
  Synthetic
tcagcaccatcaaacagata

SEQ ID NO: 41011 - DNA, 20 bp, Artificial Sequence
  Synthetic
acgcaaagcaaactacgcag

SEQ ID NO: 41012 - DNA, 20 bp, Artificial Sequence
  Synthetic
agtggatgcctactttagag

SEQ ID NO: 41013 - DNA, 20 bp, Artificial Sequence
  Synthetic
acgcaaagcctctctaaagt

SEQ ID NO: 41014 - DNA, 20 bp, Artificial Sequence
  Synthetic
cagcgagccaaagattccaa

SEQ ID NO: 41015 - DNA, 20 bp, Artificial Sequence
  Synthetic
agttttacctttggaatctt

SEQ ID NO: 41016 - DNA, 20 bp, Artificial Sequence
  Synthetic
gccttgtacagttttacctt

SEQ ID NO: 41017 - DNA, 20 bp, Artificial Sequence
  Synthetic
ttcctccctcataggctcca

SEQ ID NO: 41018 - DNA, 20 bp, Artificial Sequence
  Synthetic
tttggctgttttggaggccg

SEQ ID NO: 41019 - DNA, 20 bp, Artificial Sequence
  Synthetic
tgaacatttggctgttttgg

SEQ ID NO: 41020 - DNA, 20 bp, Artificial Sequence
  Synthetic
tccaaaacagccaaatgttc

SEQ ID NO: 41021 - DNA, 20 bp, Artificial Sequence
  Synthetic
tcctgaacatttggctgttt

SEQ ID NO: 41022 - DNA, 20 bp, Artificial Sequence
  Synthetic
aattgaaaatcctgaacatt

SEQ ID NO: 41023 - DNA, 20 bp, Artificial Sequence
  Synthetic
ggagctcaaataagcgtggt

SEQ ID NO: 41024 - DNA, 20 bp, Artificial Sequence
  Synthetic
aggagctcaaataagcgtgg

SEQ ID NO: 41025 - DNA, 20 bp, Artificial Sequence
  Synthetic
accacgcttatttgagctcc

SEQ ID NO: 41026 - DNA, 20 bp, Artificial Sequence
  Synthetic
tccaggagctcaaataagcg

SEQ ID NO: 41027 - DNA, 20 bp, Artificial Sequence
  Synthetic
cttatttgagctcctggaaa

SEQ ID NO: 41028 - DNA, 20 bp, Artificial Sequence
  Synthetic
aataaagaatttccttttcc

SEQ ID NO: 41029 - DNA, 20 bp, Artificial Sequence
  Synthetic
aaaaggaaattctttattat

SEQ ID NO: 41030 - DNA, 20 bp, Artificial Sequence
  Synthetic
ctttattatcggaagacaat

SEQ ID NO: 41031 - DNA, 20 bp, Artificial Sequence
  Synthetic
tcggaagacaataggctata

SEQ ID NO: 41032 - DNA, 20 bp, Artificial Sequence
  Synthetic
ctcttgatttataggttcca

SEQ ID NO: 41033 - DNA, 20 bp, Artificial Sequence
  Synthetic
tttgggatatcaggattcct

SEQ ID NO: 41034 - DNA, 20 bp, Artificial Sequence
  Synthetic
agagctggatttgggatatc

SEQ ID NO: 41035 - DNA, 20 bp, Artificial Sequence
  Synthetic
tgatatcccaaatccagctc

SEQ ID NO: 41036 - DNA, 20 bp, Artificial Sequence
  Synthetic
tttgagccagagctggattt

SEQ ID NO: 41037 - DNA, 20 bp, Artificial Sequence
  Synthetic
ctttgagccagagctggatt

SEQ ID NO: 41038 - DNA, 20 bp, Artificial Sequence
  Synthetic
tcttctctttgagccagagc

SEQ ID NO: 41039 - DNA, 20 bp, Artificial Sequence
  Synthetic
gaagagcaaaaaaagattga

SEQ ID NO: 41040 - DNA, 20 bp, Artificial Sequence
  Synthetic
tcagtctcttctggtgtaag

SEQ ID NO: 41041 - DNA, 20 bp, Artificial Sequence
  Synthetic
accagaagagactgaagaaa

SEQ ID NO: 41042 - DNA, 20 bp, Artificial Sequence
  Synthetic
tccttttcttcagtctcttc

SEQ ID NO: 41043 - DNA, 20 bp, Artificial Sequence
  Synthetic
ctgtgataaactacaaagat

SEQ ID NO: 41044 - DNA, 20 bp, Artificial Sequence
  Synthetic
ttcacccatcctacagttca

SEQ ID NO: 41045 - DNA, 20 bp, Artificial Sequence
  Synthetic
tcttcattcagttaccttca

SEQ ID NO: 41046 - DNA, 20 bp, Artificial Sequence
  Synthetic
tctggtaattctttccttga

SEQ ID NO: 41047 - DNA, 20 bp, Artificial Sequence
  Synthetic
ctaattaattcatagtattc

SEQ ID NO: 41048 - DNA, 20 bp, Artificial Sequence
  Synthetic
cagaatactatgaattaatt

SEQ ID NO: 41049 - DNA, 20 bp, Artificial Sequence
  Synthetic
tgaattaattaggaagccag

SEQ ID NO: 41050 - DNA, 20 bp, Artificial Sequence
  Synthetic
tttatttttttgaaatccac

SEQ ID NO: 41051 - DNA, 20 bp, Artificial Sequence
  Synthetic
agtggatttcaaaaaaataa

SEQ ID NO: 41052 - DNA, 20 bp, Artificial Sequence
  Synthetic
ggattcgtaatcataagtac

SEQ ID NO: 41053 - DNA, 20 bp, Artificial Sequence
  Synthetic
aatcataagtaccggagcct

SEQ ID NO: 41054 - DNA, 20 bp, Artificial Sequence
  Synthetic
gtaccggagcctaggcgacc

SEQ ID NO: 41055 - DNA, 20 bp, Artificial Sequence
  Synthetic
tctccaggtcgcctaggctc

SEQ ID NO: 41056 - DNA, 20 bp, Artificial Sequence
  Synthetic
gagcctaggcgacctggaga

SEQ ID NO: 41057 - DNA, 20 bp, Artificial Sequence
  Synthetic
catccttctccaggtcgcct

SEQ ID NO: 41058 - DNA, 20 bp, Artificial Sequence
  Synthetic
gaagcatgacatccttctcc

SEQ ID NO: 41059 - DNA, 20 bp, Artificial Sequence
  Synthetic
caacgctcagacgttcaacc

SEQ ID NO: 41060 - DNA, 20 bp, Artificial Sequence
  Synthetic
cgctcagacgttcaacctgg

SEQ ID NO: 41061 - DNA, 20 bp, Artificial Sequence
  Synthetic
gctcagacgttcaacctgga

SEQ ID NO: 41062 - DNA, 20 bp, Artificial Sequence
  Synthetic
gttcaacctggagggatccc

SEQ ID NO: 41063 - DNA, 20 bp, Artificial Sequence
  Synthetic
gacagacctgggatccctcc

SEQ ID NO: 41064 - DNA, 20 bp, Artificial Sequence
  Synthetic
tgggaccctaaagcattacc

SEQ ID NO: 41065 - DNA, 20 bp, Artificial Sequence
  Synthetic
ttactcttcatttcagctcc

SEQ ID NO: 41066 - DNA, 20 bp, Artificial Sequence
  Synthetic
tactcttcatttcagctcca

SEQ ID NO: 41067 - DNA, 20 bp, Artificial Sequence
  Synthetic
ttcatttcagctccagggcc

SEQ ID NO: 41068 - DNA, 20 bp, Artificial Sequence
  Synthetic
ttcagctccagggcctggaa

SEQ ID NO: 41069 - DNA, 20 bp, Artificial Sequence
  Synthetic
gctccagggcctggaatgga

SEQ ID NO: 41070 - DNA, 20 bp, Artificial Sequence
  Synthetic
aaaccatccattccaggccc

SEQ ID NO: 41071 - DNA, 20 bp, Artificial Sequence
  Synthetic
acagggaaaccatccattcc

SEQ ID NO: 41072 - DNA, 20 bp, Artificial Sequence
  Synthetic
gttcaagttgttattataca

SEQ ID NO: 41073 - DNA, 20 bp, Artificial Sequence
  Synthetic
cgttcaagttgttattatac

SEQ ID NO: 41074 - DNA, 20 bp, Artificial Sequence
  Synthetic
ctgtataataacaacttgaa

SEQ ID NO: 41075 - DNA, 20 bp, Artificial Sequence
  Synthetic
cggaatcttagccgatgaaa

SEQ ID NO: 41076 - DNA, 20 bp, Artificial Sequence
  Synthetic
ggaatcttagccgatgaaat

SEQ ID NO: 41077 - DNA, 20 bp, Artificial Sequence
  Synthetic
gaatcttagccgatgaaatg

SEQ ID NO: 41078 - DNA, 20 bp, Artificial Sequence
  Synthetic
ttagccgatgaaatggggct

SEQ ID NO: 41079 - DNA, 20 bp, Artificial Sequence
  Synthetic
ctttccaagccccatttcat

SEQ ID NO: 41080 - DNA, 20 bp, Artificial Sequence
  Synthetic
gatgagtgcaatggtctgta

SEQ ID NO: 41081 - DNA, 20 bp, Artificial Sequence
  Synthetic
cagataagtgatgagtgcaa

SEQ ID NO: 41082 - DNA, 20 bp, Artificial Sequence
  Synthetic
tgcactcatcacttatctga

SEQ ID NO: 41083 - DNA, 20 bp, Artificial Sequence
  Synthetic
atggagcacaaaagactcaa

SEQ ID NO: 41084 - DNA, 20 bp, Artificial Sequence
  Synthetic
ggggaacaatgatgagatag

SEQ ID NO: 41085 - DNA, 20 bp, Artificial Sequence
  Synthetic
aggggaacaatgatgagata

SEQ ID NO: 41086 - DNA, 20 bp, Artificial Sequence
  Synthetic
aaggggaacaatgatgagat

SEQ ID NO: 41087 - DNA, 20 bp, Artificial Sequence
  Synthetic
aatgactttacttacgaaag

SEQ ID NO: 41088 - DNA, 20 bp, Artificial Sequence
  Synthetic
aaatgactttacttacgaaa

SEQ ID NO: 41089 - DNA, 20 bp, Artificial Sequence
  Synthetic
taaatgactttacttacgaa

SEQ ID NO: 41090 - DNA, 20 bp, Artificial Sequence
  Synthetic
tccataggactctatctaac

SEQ ID NO: 41091 - DNA, 20 bp, Artificial Sequence
  Synthetic
ggacatatgaatttgacaaa

SEQ ID NO: 41092 - DNA, 20 bp, Artificial Sequence
  Synthetic
gacatatgaatttgacaaat

SEQ ID NO: 41093 - DNA, 20 bp, Artificial Sequence
  Synthetic
tgacaaatgggctccttctg

SEQ ID NO: 41094 - DNA, 20 bp, Artificial Sequence
  Synthetic
taagaaatcttcaccacaga

SEQ ID NO: 41095 - DNA, 20 bp, Artificial Sequence
  Synthetic
tgtggtgaagatttcttaca

SEQ ID NO: 41096 - DNA, 20 bp, Artificial Sequence
  Synthetic
acaagggagcgacgcatggc

SEQ ID NO: 41097 - DNA, 20 bp, Artificial Sequence
  Synthetic
ggggacaagggagcgacgca

SEQ ID NO: 41098 - DNA, 20 bp, Artificial Sequence
  Synthetic
gctcccttgtcccccagcta

SEQ ID NO: 41099 - DNA, 20 bp, Artificial Sequence
  Synthetic
actccgtagctgggggacaa

SEQ ID NO: 41100 - DNA, 20 bp, Artificial Sequence
  Synthetic
cactccgtagctgggggaca

SEQ ID NO: 41101 - DNA, 20 bp, Artificial Sequence
  Synthetic
cttgtcccccagctacggag

SEQ ID NO: 41102 - DNA, 20 bp, Artificial Sequence
  Synthetic
atttgccactccgtagctgg

SEQ ID NO: 41103 - DNA, 20 bp, Artificial Sequence
  Synthetic
aatttgccactccgtagctg

SEQ ID NO: 41104 - DNA, 20 bp, Artificial Sequence
  Synthetic
gaatttgccactccgtagct

SEQ ID NO: 41105 - DNA, 20 bp, Artificial Sequence
  Synthetic
tgaatttgccactccgtagc

SEQ ID NO: 41106 - DNA, 20 bp, Artificial Sequence
  Synthetic
tatactcataagtagtcaag

SEQ ID NO: 41107 - DNA, 20 bp, Artificial Sequence
  Synthetic
agacaagcacattcttgcaa

SEQ ID NO: 41108 - DNA, 20 bp, Artificial Sequence
  Synthetic
ctcttgtgttatagattcgg

SEQ ID NO: 41109 - DNA, 20 bp, Artificial Sequence
  Synthetic
tcggtggaaatacatgatag

SEQ ID NO: 41110 - DNA, 20 bp, Artificial Sequence
  Synthetic
aaatacatgatagtggacga

SEQ ID NO: 41111 - DNA, 20 bp, Artificial Sequence
  Synthetic
agtggtgattcttcattcgg

SEQ ID NO: 41112 - DNA, 20 bp, Artificial Sequence
  Synthetic
tgcagtggtgattcttcatt

SEQ ID NO: 41113 - DNA, 20 bp, Artificial Sequence
  Synthetic
tcaccactgcaagctgactc

SEQ ID NO: 41114 - DNA, 20 bp, Artificial Sequence
  Synthetic
agacctgagtcagcttgcag

SEQ ID NO: 41115 - DNA, 20 bp, Artificial Sequence
  Synthetic
ggtcttgaacactcactatg

SEQ ID NO: 41116 - DNA, 20 bp, Artificial Sequence
  Synthetic
ctcactatgtggcccccaga

SEQ ID NO: 41117 - DNA, 20 bp, Artificial Sequence
  Synthetic
agtcaagaggatccttctgg

SEQ ID NO: 41118 - DNA, 20 bp, Artificial Sequence
  Synthetic
cagtcaagaggatccttctg

SEQ ID NO: 41119 - DNA, 20 bp, Artificial Sequence
  Synthetic
ccagtcaagaggatccttct

SEQ ID NO: 41120 - DNA, 20 bp, Artificial Sequence
  Synthetic
cccagaaggatcctcttgac

SEQ ID NO: 41121 - DNA, 20 bp, Artificial Sequence
  Synthetic
cccagtcaagaggatccttc

SEQ ID NO: 41122 - DNA, 20 bp, Artificial Sequence
  Synthetic
ccagaaggatcctcttgact

SEQ ID NO: 41123 - DNA, 20 bp, Artificial Sequence
  Synthetic
gcagcggggtcccagtcaag

SEQ ID NO: 41124 - DNA, 20 bp, Artificial Sequence
  Synthetic
agggagcttattctgcagcg

SEQ ID NO: 41125 - DNA, 20 bp, Artificial Sequence
  Synthetic
cagggagcttattctgcagc

SEQ ID NO: 41126 - DNA, 20 bp, Artificial Sequence
  Synthetic
tcagggagcttattctgcag

SEQ ID NO: 41127 - DNA, 20 bp, Artificial Sequence
  Synthetic
agaataagctccctgaactc

SEQ ID NO: 41128 - DNA, 20 bp, Artificial Sequence
  Synthetic
gaataagctccctgaactct

SEQ ID NO: 41129 - DNA, 20 bp, Artificial Sequence
  Synthetic
tgaggagggcccagagttca

SEQ ID NO: 41130 - DNA, 20 bp, Artificial Sequence
  Synthetic
ttgaggagggcccagagttc

SEQ ID NO: 41131 - DNA, 20 bp, Artificial Sequence
  Synthetic
tgggaggaggaagttgagga

SEQ ID NO: 41132 - DNA, 20 bp, Artificial Sequence
  Synthetic
ttgggaggaggaagttgagg

SEQ ID NO: 41133 - DNA, 20 bp, Artificial Sequence
  Synthetic
ttgttgggaggaggaagttg

SEQ ID NO: 41134 - DNA, 20 bp, Artificial Sequence
  Synthetic
tcttaaaaattgttgggagg

SEQ ID NO: 41135 - DNA, 20 bp, Artificial Sequence
  Synthetic
agctcttaaaaattgttggg

SEQ ID NO: 41136 - DNA, 20 bp, Artificial Sequence
  Synthetic
tgcagctcttaaaaattgtt

SEQ ID NO: 41137 - DNA, 20 bp, Artificial Sequence
  Synthetic
ctgcagctcttaaaaattgt

SEQ ID NO: 41138 - DNA, 20 bp, Artificial Sequence
  Synthetic
gctgcagcacatttgaacaa

SEQ ID NO: 41139 - DNA, 20 bp, Artificial Sequence
  Synthetic
aatgctccatttgccatgac

SEQ ID NO: 41140 - DNA, 20 bp, Artificial Sequence
  Synthetic
ctttcaccagtcatggcaaa

SEQ ID NO: 41141 - DNA, 20 bp, Artificial Sequence
  Synthetic
catttgccatgactggtgaa

SEQ ID NO: 41142 - DNA, 20 bp, Artificial Sequence
  Synthetic
atttgccatgactggtgaaa

SEQ ID NO: 41143 - DNA, 20 bp, Artificial Sequence
  Synthetic
cagtaccctttcaccagtca

SEQ ID NO: 41144 - DNA, 20 bp, Artificial Sequence
  Synthetic
aagaaactatattgatcatc

SEQ ID NO: 41145 - DNA, 20 bp, Artificial Sequence
  Synthetic
gatcatcaggcgtctacata

SEQ ID NO: 41146 - DNA, 20 bp, Artificial Sequence
  Synthetic
tgttaagaccatttttacta

SEQ ID NO: 41147 - DNA, 20 bp, Artificial Sequence
  Synthetic
ttcagtctccttagtaaaaa

SEQ ID NO: 41148 - DNA, 20 bp, Artificial Sequence
  Synthetic
acatactttttcgggaagct

SEQ ID NO: 41149 - DNA, 20 bp, Artificial Sequence
  Synthetic
aacatactttttcgggaagc

SEQ ID NO: 41150 - DNA, 20 bp, Artificial Sequence
  Synthetic
gttgtgcaacatactttttc

SEQ ID NO: 41151 - DNA, 20 bp, Artificial Sequence
  Synthetic
ggttgtgcaacatacttttt

SEQ ID NO: 41152 - DNA, 20 bp, Artificial Sequence
  Synthetic
gtatcgccatatgcaagcca

SEQ ID NO: 41153 - DNA, 20 bp, Artificial Sequence
  Synthetic
tatcgccatatgcaagccaa

SEQ ID NO: 41154 - DNA, 20 bp, Artificial Sequence
  Synthetic
atcgccatatgcaagccaag

SEQ ID NO: 41155 - DNA, 20 bp, Artificial Sequence
  Synthetic
ggatccccttggcttgcata

SEQ ID NO: 41156 - DNA, 20 bp, Artificial Sequence
  Synthetic
atctgtgagaaggatcccct

SEQ ID NO: 41157 - DNA, 20 bp, Artificial Sequence
  Synthetic
aaggggatccttctcacaga

SEQ ID NO: 41158 - DNA, 20 bp, Artificial Sequence
  Synthetic
tctcagaaccatctgtgaga

SEQ ID NO: 41159 - DNA, 20 bp, Artificial Sequence
  Synthetic
tggttctgagaaagataaga

SEQ ID NO: 41160 - DNA, 20 bp, Artificial Sequence
  Synthetic
tccactggttcttaggggaa

SEQ ID NO: 41161 - DNA, 20 bp, Artificial Sequence
  Synthetic
actggttcttaggggaaagg

SEQ ID NO: 41162 - DNA, 20 bp, Artificial Sequence
  Synthetic
tgtgctgaaacatatatggg

SEQ ID NO: 41163 - DNA, 20 bp, Artificial Sequence
  Synthetic
caatgtgctgaaacatatat

SEQ ID NO: 41164 - DNA, 20 bp, Artificial Sequence
  Synthetic
tcaatgtgctgaaacatata

SEQ ID NO: 41165 - DNA, 20 bp, Artificial Sequence
  Synthetic
ccgtgatcaagtacaaggac

SEQ ID NO: 41166 - DNA, 20 bp, Artificial Sequence
  Synthetic
cagtggacgtcagctcagcg

SEQ ID NO: 41167 - DNA, 20 bp, Artificial Sequence
  Synthetic
catccagctgccctcgcgaa

SEQ ID NO: 41168 - DNA, 20 bp, Artificial Sequence
  Synthetic
gctcctttcgcgagggcagc

SEQ ID NO: 41169 - DNA, 20 bp, Artificial Sequence
  Synthetic
tcgggcagctcctttcgcga

SEQ ID NO: 41170 - DNA, 20 bp, Artificial Sequence
  Synthetic
ctcgggcagctcctttcgcg

SEQ ID NO: 41171 - DNA, 20 bp, Artificial Sequence
  Synthetic
cggatgagctcgtagtactc

SEQ ID NO: 41172 - DNA, 20 bp, Artificial Sequence
  Synthetic
gcggatgagctcgtagtact

SEQ ID NO: 41173 - DNA, 20 bp, Artificial Sequence
  Synthetic
cgagctcatccgcaagcccg

SEQ ID NO: 41174 - DNA, 20 bp, Artificial Sequence
  Synthetic
tcttgaagtccacgggcttg

SEQ ID NO: 41175 - DNA, 20 bp, Artificial Sequence
  Synthetic
tttatcttcttgaagtccac

SEQ ID NO: 41176 - DNA, 20 bp, Artificial Sequence
  Synthetic
ctttatcttcttgaagtcca

SEQ ID NO: 41177 - DNA, 20 bp, Artificial Sequence
  Synthetic
cgtggacttcaagaagataa

SEQ ID NO: 41178 - DNA, 20 bp, Artificial Sequence
  Synthetic
cgttgaggctgcggtacttg

SEQ ID NO: 41179 - DNA, 20 bp, Artificial Sequence
  Synthetic
tctctaggtcgttgaggctg

SEQ ID NO: 41180 - DNA, 20 bp, Artificial Sequence
  Synthetic
cagcctcaacgacctagaga

SEQ ID NO: 41181 - DNA, 20 bp, Artificial Sequence
  Synthetic
cgtccttctctaggtcgttg

SEQ ID NO: 41182 - DNA, 20 bp, Artificial Sequence
  Synthetic
ggagcatgacgtccttctct

SEQ ID NO: 41183 - DNA, 20 bp, Artificial Sequence
  Synthetic
aggtctgtgcgttctggcac

SEQ ID NO: 41184 - DNA, 20 bp, Artificial Sequence
  Synthetic
ggttgaaggtctgtgcgttc

SEQ ID NO: 41185 - DNA, 20 bp, Artificial Sequence
  Synthetic
gaacgcacagaccttcaacc

SEQ ID NO: 41186 - DNA, 20 bp, Artificial Sequence
  Synthetic
cgcacagaccttcaacctgg

SEQ ID NO: 41187 - DNA, 20 bp, Artificial Sequence
  Synthetic
gcacagaccttcaacctgga

SEQ ID NO: 41188 - DNA, 20 bp, Artificial Sequence
  Synthetic
cagggagccctccaggttga

SEQ ID NO: 41189 - DNA, 20 bp, Artificial Sequence
  Synthetic
cttcaacctggagggctccc

SEQ ID NO: 41190 - DNA, 20 bp, Artificial Sequence
  Synthetic
ccctcaccagggagccctcc

SEQ ID NO: 41191 - DNA, 20 bp, Artificial Sequence
  Synthetic
cgatggagtcttcatagatc

SEQ ID NO: 41192 - DNA, 20 bp, Artificial Sequence
  Synthetic
tggtgtcctcaaacagtacc

SEQ ID NO: 41193 - DNA, 20 bp, Artificial Sequence
  Synthetic
catctgtccttgcagatcaa

SEQ ID NO: 41194 - DNA, 20 bp, Artificial Sequence
  Synthetic
gtccttgcagatcaaaggtt

SEQ ID NO: 41195 - DNA, 20 bp, Artificial Sequence
  Synthetic
tgcagatcaaaggtttggag

SEQ ID NO: 41196 - DNA, 20 bp, Artificial Sequence
  Synthetic
gatcaaaggtttggagtggc

SEQ ID NO: 41197 - DNA, 20 bp, Artificial Sequence
  Synthetic
gttcaggttgttgttgtaca

SEQ ID NO: 41198 - DNA, 20 bp, Artificial Sequence
  Synthetic
cgttcaggttgttgttgtac

SEQ ID NO: 41199 - DNA, 20 bp, Artificial Sequence
  Synthetic
ctgtacaacaacaacctgaa

SEQ ID NO: 41200 - DNA, 20 bp, Artificial Sequence
  Synthetic
caacaacctgaacggcatcc

SEQ ID NO: 41201 - DNA, 20 bp, Artificial Sequence
  Synthetic
cgtcggccaggatgccgttc

SEQ ID NO: 41202 - DNA, 20 bp, Artificial Sequence
  Synthetic
cggcatcctggccgacgaga

SEQ ID NO: 41203 - DNA, 20 bp, Artificial Sequence
  Synthetic
ggcatcctggccgacgagat

SEQ ID NO: 41204 - DNA, 20 bp, Artificial Sequence
  Synthetic
ccaggcccatctcgtcggcc

SEQ ID NO: 41205 - DNA, 20 bp, Artificial Sequence
  Synthetic
cctggccgacgagatgggcc

SEQ ID NO: 41206 - DNA, 20 bp, Artificial Sequence
  Synthetic
ctggccgacgagatgggcct

SEQ ID NO: 41207 - DNA, 20 bp, Artificial Sequence
  Synthetic
tggccgacgagatgggcctg

SEQ ID NO: 41208 - DNA, 20 bp, Artificial Sequence
  Synthetic
cttccccaggcccatctcgt

SEQ ID NO: 41209 - DNA, 20 bp, Artificial Sequence
  Synthetic
tggtctggatggtcttcccc

SEQ ID NO: 41210 - DNA, 20 bp, Artificial Sequence
  Synthetic
gatgagcgcgatggtctgga

SEQ ID NO: 41211 - DNA, 20 bp, Artificial Sequence
  Synthetic
acgtgatgagcgcgatggtc

SEQ ID NO: 41212 - DNA, 20 bp, Artificial Sequence
  Synthetic
gaggtacgtgatgagcgcga

SEQ ID NO: 41213 - DNA, 20 bp, Artificial Sequence
  Synthetic
cgcgctcatcacgtacctca

SEQ ID NO: 41214 - DNA, 20 bp, Artificial Sequence
  Synthetic
tgatgcgtttgtgctccatg

SEQ ID NO: 41215 - DNA, 20 bp, Artificial Sequence
  Synthetic
atggagcacaaacgcatcaa

SEQ ID NO: 41216 - DNA, 20 bp, Artificial Sequence
  Synthetic
tggagcacaaacgcatcaat

SEQ ID NO: 41217 - DNA, 20 bp, Artificial Sequence
  Synthetic
agaggcacgatgatgaggaa

SEQ ID NO: 41218 - DNA, 20 bp, Artificial Sequence
  Synthetic
gagaggcacgatgatgagga

SEQ ID NO: 41219 - DNA, 20 bp, Artificial Sequence
  Synthetic
acgagagaggcacgatgatg

SEQ ID NO: 41220 - DNA, 20 bp, Artificial Sequence
  Synthetic
gcagcgggtactcacgagag

SEQ ID NO: 41221 - DNA, 20 bp, Artificial Sequence
  Synthetic
ccatcagaacgctgtccaac

SEQ ID NO: 41222 - DNA, 20 bp, Artificial Sequence
  Synthetic
catcagaacgctgtccaact

SEQ ID NO: 41223 - DNA, 20 bp, Artificial Sequence
  Synthetic
gtcaaactcgtacgcccagt

SEQ ID NO: 41224 - DNA, 20 bp, Artificial Sequence
  Synthetic
gggcgtacgagtttgacaag

SEQ ID NO: 41225 - DNA, 20 bp, Artificial Sequence
  Synthetic
ggcgtacgagtttgacaagt

SEQ ID NO: 41226 - DNA, 20 bp, Artificial Sequence
  Synthetic
tgacaagtgggccccctccg

SEQ ID NO: 41227 - DNA, 20 bp, Artificial Sequence
  Synthetic
gtgggccccctccgtggtga

SEQ ID NO: 41228 - DNA, 20 bp, Artificial Sequence
  Synthetic
agacaccttcaccacggagg

SEQ ID NO: 41229 - DNA, 20 bp, Artificial Sequence
  Synthetic
aagacaccttcaccacggag

SEQ ID NO: 41230 - DNA, 20 bp, Artificial Sequence
  Synthetic
taagacaccttcaccacgga

SEQ ID NO: 41231 - DNA, 20 bp, Artificial Sequence
  Synthetic
gtaagacaccttcaccacgg

SEQ ID NO: 41232 - DNA, 20 bp, Artificial Sequence
  Synthetic
cttgtaagacaccttcacca

SEQ ID NO: 41233 - DNA, 20 bp, Artificial Sequence
  Synthetic
cgtggtgaaggtgtcttaca

SEQ ID NO: 41234 - DNA, 20 bp, Artificial Sequence
  Synthetic
gtgaaggtgtcttacaaggt

SEQ ID NO: 41235 - DNA, 20 bp, Artificial Sequence
  Synthetic
agggatccccagcagcaaga

SEQ ID NO: 41236 - DNA, 20 bp, Artificial Sequence
  Synthetic
gggatccccagcagcaagac

SEQ ID NO: 41237 - DNA, 20 bp, Artificial Sequence
  Synthetic
aaaggcccgtcttgctgctg

SEQ ID NO: 41238 - DNA, 20 bp, Artificial Sequence
  Synthetic
caaaggcccgtcttgctgct

SEQ ID NO: 41239 - DNA, 20 bp, Artificial Sequence
  Synthetic
acaaaggcccgtcttgctgc

SEQ ID NO: 41240 - DNA, 20 bp, Artificial Sequence
  Synthetic
gggcctttgtcccccagctc

SEQ ID NO: 41241 - DNA, 20 bp, Artificial Sequence
  Synthetic
actccggagctgggggacaa

SEQ ID NO: 41242 - DNA, 20 bp, Artificial Sequence
  Synthetic
tttgtcccccagctccggag

SEQ ID NO: 41243 - DNA, 20 bp, Artificial Sequence
  Synthetic
ttgtcccccagctccggagt

SEQ ID NO: 41244 - DNA, 20 bp, Artificial Sequence
  Synthetic
acttcccactccggagctgg

SEQ ID NO: 41245 - DNA, 20 bp, Artificial Sequence
  Synthetic
aacttcccactccggagctg

SEQ ID NO: 41246 - DNA, 20 bp, Artificial Sequence
  Synthetic
gaacttcccactccggagct

SEQ ID NO: 41247 - DNA, 20 bp, Artificial Sequence
  Synthetic
tgaacttcccactccggagc

SEQ ID NO: 41248 - DNA, 20 bp, Artificial Sequence
  Synthetic
agacgttgaacttcccactc

SEQ ID NO: 41249 - DNA, 20 bp, Artificial Sequence
  Synthetic
agacaagcacatcctcgcca

SEQ ID NO: 41250 - DNA, 20 bp, Artificial Sequence
  Synthetic
agggacacgttaccttggcg

SEQ ID NO: 41251 - DNA, 20 bp, Artificial Sequence
  Synthetic
tctggggcccgcagatccgt

SEQ ID NO: 41252 - DNA, 20 bp, Artificial Sequence
  Synthetic
ccacaatcatgtacttccaa

SEQ ID NO: 41253 - DNA, 20 bp, Artificial Sequence
  Synthetic
ccgttggaagtacatgattg

SEQ ID NO: 41254 - DNA, 20 bp, Artificial Sequence
  Synthetic
aagtacatgattgtggacga

SEQ ID NO: 41255 - DNA, 20 bp, Artificial Sequence
  Synthetic
tgcagtggtggttcttcatg

SEQ ID NO: 41256 - DNA, 20 bp, Artificial Sequence
  Synthetic
cctgcgtcagcttgcagtgg

SEQ ID NO: 41257 - DNA, 20 bp, Artificial Sequence
  Synthetic
ccaccactgcaagctgacgc

SEQ ID NO: 41258 - DNA, 20 bp, Artificial Sequence
  Synthetic
gcacctgcgtcagcttgcag

SEQ ID NO: 41259 - DNA, 20 bp, Artificial Sequence
  Synthetic
ggtgctcaacacgcactatg

SEQ ID NO: 41260 - DNA, 20 bp, Artificial Sequence
  Synthetic
accccgccgcctgctgctga

SEQ ID NO: 41261 - DNA, 20 bp, Artificial Sequence
  Synthetic
cccgtcagcagcaggcggcg

SEQ ID NO: 41262 - DNA, 20 bp, Artificial Sequence
  Synthetic
ccccgccgcctgctgctgac

SEQ ID NO: 41263 - DNA, 20 bp, Artificial Sequence
  Synthetic
gcccgtcagcagcaggcggc

SEQ ID NO: 41264 - DNA, 20 bp, Artificial Sequence
  Synthetic
tgcccgtcagcagcaggcgg

SEQ ID NO: 41265 - DNA, 20 bp, Artificial Sequence
  Synthetic
gtgtgcccgtcagcagcagg

SEQ ID NO: 41266 - DNA, 20 bp, Artificial Sequence
  Synthetic
gcggtgtgcccgtcagcagc

SEQ ID NO: 41267 - DNA, 20 bp, Artificial Sequence
  Synthetic
tcgggaagcttgttctgcag

SEQ ID NO: 41268 - DNA, 20 bp, Artificial Sequence
  Synthetic
agaacaagcttcccgagctc

SEQ ID NO: 41269 - DNA, 20 bp, Artificial Sequence
  Synthetic
gaacaagcttcccgagctct

SEQ ID NO: 41270 - DNA, 20 bp, Artificial Sequence
  Synthetic
ttgagcagcgcccagagctc

SEQ ID NO: 41271 - DNA, 20 bp, Artificial Sequence
  Synthetic
gttgagcagcgcccagagct

SEQ ID NO: 41272 - DNA, 20 bp, Artificial Sequence
  Synthetic
tcttgaagatggtgggcagc

SEQ ID NO: 41273 - DNA, 20 bp, Artificial Sequence
  Synthetic
ctgcagctcttgaagatggt

SEQ ID NO: 41274 - DNA, 20 bp, Artificial Sequence
  Synthetic
gctgcagctcttgaagatgg

SEQ ID NO: 41275 - DNA, 20 bp, Artificial Sequence
  Synthetic
ggtgctgcagctcttgaaga

SEQ ID NO: 41276 - DNA, 20 bp, Artificial Sequence
  Synthetic
gctgcagcaccttcgagcag

SEQ ID NO: 41277 - DNA, 20 bp, Artificial Sequence
  Synthetic
tgcgttaaaccactgctcga

SEQ ID NO: 41278 - DNA, 20 bp, Artificial Sequence
  Synthetic
aacgcaccctttgccatgac

SEQ ID NO: 41279 - DNA, 20 bp, Artificial Sequence
  Synthetic
acgcaccctttgccatgacc

SEQ ID NO: 41280 - DNA, 20 bp, Artificial Sequence
  Synthetic
cgcaccctttgccatgaccg

SEQ ID NO: 41281 - DNA, 20 bp, Artificial Sequence
  Synthetic
ttttccccggtcatggcaaa

SEQ ID NO: 41282 - DNA, 20 bp, Artificial Sequence
  Synthetic
cttttccccggtcatggcaa

SEQ ID NO: 41283 - DNA, 20 bp, Artificial Sequence
  Synthetic
ctttgccatgaccggggaaa

SEQ ID NO: 41284 - DNA, 20 bp, Artificial Sequence
  Synthetic
tgccatgaccggggaaaagg

SEQ ID NO: 41285 - DNA, 20 bp, Artificial Sequence
  Synthetic
gccatgaccggggaaaaggt

SEQ ID NO: 41286 - DNA, 20 bp, Artificial Sequence
  Synthetic
acccaccttttccccggtca

SEQ ID NO: 41287 - DNA, 20 bp, Artificial Sequence
  Synthetic
gggcaaacccaccttttccc

SEQ ID NO: 41288 - DNA, 20 bp, Artificial Sequence
  Synthetic
cttccaggtggacctgaatg

SEQ ID NO: 41289 - DNA, 20 bp, Artificial Sequence
  Synthetic
cctcctcattcaggtccacc

SEQ ID NO: 41290 - DNA, 20 bp, Artificial Sequence
  Synthetic
ccaggtggacctgaatgagg

SEQ ID NO: 41291 - DNA, 20 bp, Artificial Sequence
  Synthetic
gaatggtttcctcctcattc

SEQ ID NO: 41292 - DNA, 20 bp, Artificial Sequence
  Synthetic
aggaaaccattctcatcatc

SEQ ID NO: 41293 - DNA, 20 bp, Artificial Sequence
  Synthetic
gagacgccggatgatgagaa

SEQ ID NO: 41294 - DNA, 20 bp, Artificial Sequence
  Synthetic
gcagcactttgtggagacgc

SEQ ID NO: 41295 - DNA, 20 bp, Artificial Sequence
  Synthetic
ggcgtctccacaaagtgctg

SEQ ID NO: 41296 - DNA, 20 bp, Artificial Sequence
  Synthetic
agaagggccgcagcactttg

SEQ ID NO: 41297 - DNA, 20 bp, Artificial Sequence
  Synthetic
ttgagtcgtcggagcaagaa

SEQ ID NO: 41298 - DNA, 20 bp, Artificial Sequence
  Synthetic
cttgagtcgtcggagcaaga

SEQ ID NO: 41299 - DNA, 20 bp, Artificial Sequence
  Synthetic
cttgctccgacgactcaaga

SEQ ID NO: 41300 - DNA, 20 bp, Artificial Sequence
  Synthetic
cgacttccttcttgagtcgt

SEQ ID NO: 41301 - DNA, 20 bp, Artificial Sequence
  Synthetic
acgactcaagaaggaagtcg

SEQ ID NO: 41302 - DNA, 20 bp, Artificial Sequence
  Synthetic
cgaggcccagttgcccgaaa

SEQ ID NO: 41303 - DNA, 20 bp, Artificial Sequence
  Synthetic
catcaccttttcgggcaact

SEQ ID NO: 41304 - DNA, 20 bp, Artificial Sequence
  Synthetic
ccatcaccttttcgggcaac

SEQ ID NO: 41305 - DNA, 20 bp, Artificial Sequence
  Synthetic
caaaactccatcaccttttc

SEQ ID NO: 41306 - DNA, 20 bp, Artificial Sequence
  Synthetic
tcaaaactccatcacctttt

SEQ ID NO: 41307 - DNA, 20 bp, Artificial Sequence
  Synthetic
agtgctctaccgccacatgc

SEQ ID NO: 41308 - DNA, 20 bp, Artificial Sequence
  Synthetic
ctaccgccacatgcaggcca

SEQ ID NO: 41309 - DNA, 20 bp, Artificial Sequence
  Synthetic
taccgccacatgcaggccaa

SEQ ID NO: 41310 - DNA, 20 bp, Artificial Sequence
  Synthetic
cgcccttggcctgcatgtgg

SEQ ID NO: 41311 - DNA, 20 bp, Artificial Sequence
  Synthetic
gcacgcccttggcctgcatg

SEQ ID NO: 41312 - DNA, 20 bp, Artificial Sequence
  Synthetic
atcagtcagcagcacgccct

SEQ ID NO: 41313 - DNA, 20 bp, Artificial Sequence
  Synthetic
aagggcgtgctgctgactga

SEQ ID NO: 41314 - DNA, 20 bp, Artificial Sequence
  Synthetic
gctgactgatggctccgaga

SEQ ID NO: 41315 - DNA, 20 bp, Artificial Sequence
  Synthetic
tggctccgagaaggacaaga

SEQ ID NO: 41316 - DNA, 20 bp, Artificial Sequence
  Synthetic
ctccgagaaggacaagaagg

SEQ ID NO: 41317 - DNA, 20 bp, Artificial Sequence
  Synthetic
tccgagaaggacaagaaggt

SEQ ID NO: 41318 - DNA, 20 bp, Artificial Sequence
  Synthetic
gcccaccttcttgtccttct

SEQ ID NO: 41319 - DNA, 20 bp, Artificial Sequence
  Synthetic
tcatctgccttccagggcaa

SEQ ID NO: 41320 - DNA, 20 bp, Artificial Sequence
  Synthetic
tctgccttccagggcaaagg

SEQ ID NO: 41321 - DNA, 20 bp, Artificial Sequence
  Synthetic
tcttggtgccgcctttgccc

SEQ ID NO: 41322 - DNA, 20 bp, Artificial Sequence
  Synthetic
gatggtgttcatcagggtct

SEQ ID NO: 41323 - DNA, 20 bp, Artificial Sequence
  Synthetic
ctgcatgatggtgttcatca

SEQ ID NO: 41324 - DNA, 20 bp, Artificial Sequence
  Synthetic
gctgcatgatggtgttcatc

SEQ ID NO: 41325 - DNA, 20 bp, Artificial Sequence
  Synthetic
tgaacaccatcatgcagctg

SEQ ID NO: 41326 - DNA, 20 bp, Artificial Sequence
  Synthetic
gatcttccgcagctgcatga

SEQ ID NO: 41327 - DNA, 20 bp, Artificial Sequence
  Synthetic
tgtgctggaacatgtagggg

SEQ ID NO: 41328 - DNA, 20 bp, Artificial Sequence
  Synthetic
cgatgtgctggaacatgtag

SEQ ID NO: 41329 - DNA, 20 bp, Artificial Sequence
  Synthetic
tcgatgtgctggaacatgta

SEQ ID NO: 41330 - DNA, 20 bp, Artificial Sequence
  Synthetic
ctcgatgtgctggaacatgt

SEQ ID NO: 41331 - DNA, 20 bp, Artificial Sequence
  Synthetic
gggtaaactgagagattatc

SEQ ID NO: 41332 - DNA, 20 bp, Artificial Sequence
  Synthetic
ctgagagattatcaggtccg

SEQ ID NO: 41333 - DNA, 20 bp, Artificial Sequence
  Synthetic
atcaggtccgaggattaaac

SEQ ID NO: 41334 - DNA, 20 bp, Artificial Sequence
  Synthetic
aaatgagccagtttaatcct

SEQ ID NO: 41335 - DNA, 20 bp, Artificial Sequence
  Synthetic
ctcatttctttgtatgagaa

SEQ ID NO: 41336 - DNA, 20 bp, Artificial Sequence
  Synthetic
ttgtatgagaatggcatcaa

SEQ ID NO: 41337 - DNA, 20 bp, Artificial Sequence
  Synthetic
tggtatccttgcagatgaaa

SEQ ID NO: 41338 - DNA, 20 bp, Artificial Sequence
  Synthetic
cacataccatttcatctgca

SEQ ID NO: 41339 - DNA, 20 bp, Artificial Sequence
  Synthetic
tttgaaatctttcagggcct

SEQ ID NO: 41340 - DNA, 20 bp, Artificial Sequence
  Synthetic
ttgtttgaagagtctttcct

SEQ ID NO: 41341 - DNA, 20 bp, Artificial Sequence
  Synthetic
cttcaaacaatttctcttct

SEQ ID NO: 41342 - DNA, 20 bp, Artificial Sequence
  Synthetic
ttcaaacaatttctcttctt

SEQ ID NO: 41343 - DNA, 20 bp, Artificial Sequence
  Synthetic
aaacattatagaaacattcc

SEQ ID NO: 41344 - DNA, 20 bp, Artificial Sequence
  Synthetic
aacattatagaaacattcct

SEQ ID NO: 41345 - DNA, 20 bp, Artificial Sequence
  Synthetic
aaacattcctgggcctcata

SEQ ID NO: 41346 - DNA, 20 bp, Artificial Sequence
  Synthetic
tcctgggcctcatatggttt

SEQ ID NO: 41347 - DNA, 20 bp, Artificial Sequence
  Synthetic
accaaaaccatatgaggccc

SEQ ID NO: 41348 - DNA, 20 bp, Artificial Sequence
  Synthetic
ttaggaaccaaaaccatatg

SEQ ID NO: 41349 - DNA, 20 bp, Artificial Sequence
  Synthetic
cagttgtgtaatgtagactt

SEQ ID NO: 41350 - DNA, 20 bp, Artificial Sequence
  Synthetic
ctaagtctacattacacaac

SEQ ID NO: 41351 - DNA, 20 bp, Artificial Sequence
  Synthetic
ggatgagtgaattcaagaga

SEQ ID NO: 41352 - DNA, 20 bp, Artificial Sequence
  Synthetic
gatgagtgaattcaagagat

SEQ ID NO: 41353 - DNA, 20 bp, Artificial Sequence
  Synthetic
aaacaaacagatctaagtgt

SEQ ID NO: 41354 - DNA, 20 bp, Artificial Sequence
  Synthetic
cttagatctgtttgtttgat

SEQ ID NO: 41355 - DNA, 20 bp, Artificial Sequence
  Synthetic
tgtcagagacgttttattac

SEQ ID NO: 41356 - DNA, 20 bp, Artificial Sequence
  Synthetic
gtcagagacgttttattacc

SEQ ID NO: 41357 - DNA, 20 bp, Artificial Sequence
  Synthetic
acgttttattaccgggagaa

SEQ ID NO: 41358 - DNA, 20 bp, Artificial Sequence
  Synthetic
cgttttattaccgggagaat

SEQ ID NO: 41359 - DNA, 20 bp, Artificial Sequence
  Synthetic
acacatacatcccattctcc

SEQ ID NO: 41360 - DNA, 20 bp, Artificial Sequence
  Synthetic
ctgtgttcaaaaaatttaat

SEQ ID NO: 41361 - DNA, 20 bp, Artificial Sequence
  Synthetic
tagtaatagatgaagctcac

SEQ ID NO: 41362 - DNA, 20 bp, Artificial Sequence
  Synthetic
gatcaaaaatgaaaaatcta

SEQ ID NO: 41363 - DNA, 20 bp, Artificial Sequence
  Synthetic
ttcagttgtcagaaatagtg

SEQ ID NO: 41364 - DNA, 20 bp, Artificial Sequence
  Synthetic
tcagttgtcagaaatagtga

SEQ ID NO: 41365 - DNA, 20 bp, Artificial Sequence
  Synthetic
acaaatagactattattaac

SEQ ID NO: 41366 - DNA, 20 bp, Artificial Sequence
  Synthetic
tcatgcaagttgttctgaag

SEQ ID NO: 41367 - DNA, 20 bp, Artificial Sequence
  Synthetic
agaacaacttgcatgagctg

SEQ ID NO: 41368 - DNA, 20 bp, Artificial Sequence
  Synthetic
tctgctgaattaaacacatc

SEQ ID NO: 41369 - DNA, 20 bp, Artificial Sequence
  Synthetic
ttatctaggactttgattcc

SEQ ID NO: 41370 - DNA, 20 bp, Artificial Sequence
  Synthetic
gcagttgtttgtatcaaacc

SEQ ID NO: 41371 - DNA, 20 bp, Artificial Sequence
  Synthetic
tttgatacaaacaactgcct

SEQ ID NO: 41372 - DNA, 20 bp, Artificial Sequence
  Synthetic
ttgatacaaacaactgcctt

SEQ ID NO: 41373 - DNA, 20 bp, Artificial Sequence
  Synthetic
tgatacaaacaactgccttg

SEQ ID NO: 41374 - DNA, 20 bp, Artificial Sequence
  Synthetic
caactagtttttgatcccca

SEQ ID NO: 41375 - DNA, 20 bp, Artificial Sequence
  Synthetic
gggatcaaaaactagttgag

SEQ ID NO: 41376 - DNA, 20 bp, Artificial Sequence
  Synthetic
actagttgagaggcttcata

SEQ ID NO: 41377 - DNA, 20 bp, Artificial Sequence
  Synthetic
ttaattcgacgaaggaggaa

SEQ ID NO: 41378 - DNA, 20 bp, Artificial Sequence
  Synthetic
attcctccttcgtcgaatta

SEQ ID NO: 41379 - DNA, 20 bp, Artificial Sequence
  Synthetic
cagccttaattcgacgaagg

SEQ ID NO: 41380 - DNA, 20 bp, Artificial Sequence
  Synthetic
catcagccttaattcgacga

SEQ ID NO: 41381 - DNA, 20 bp, Artificial Sequence
  Synthetic
aaagagtttgcctccaaaga

SEQ ID NO: 41382 - DNA, 20 bp, Artificial Sequence
  Synthetic
atttttacttccttctttgg

SEQ ID NO: 41383 - DNA, 20 bp, Artificial Sequence
  Synthetic
tagatttttacttccttctt

SEQ ID NO: 41384 - DNA, 20 bp, Artificial Sequence
  Synthetic
gaaggaagtaaaaatctatg

SEQ ID NO: 41385 - DNA, 20 bp, Artificial Sequence
  Synthetic
aaggaagtaaaaatctatgt

SEQ ID NO: 41386 - DNA, 20 bp, Artificial Sequence
  Synthetic
tgggcctcagcaaaatgcaa

SEQ ID NO: 41387 - DNA, 20 bp, Artificial Sequence
  Synthetic
gggcctcagcaaaatgcaaa

SEQ ID NO: 41388 - DNA, 20 bp, Artificial Sequence
  Synthetic
attccctttgcattttgctg

SEQ ID NO: 41389 - DNA, 20 bp, Artificial Sequence
  Synthetic
tcagcaaaatgcaaagggaa

SEQ ID NO: 41390 - DNA, 20 bp, Artificial Sequence
  Synthetic
cttctttgaataggtatact

SEQ ID NO: 41391 - DNA, 20 bp, Artificial Sequence
  Synthetic
gtatactcggatattaatga

SEQ ID NO: 41392 - DNA, 20 bp, Artificial Sequence
  Synthetic
atagatatactcaactcagc

SEQ ID NO: 41393 - DNA, 20 bp, Artificial Sequence
  Synthetic
actcaactcagcaggcaaga

SEQ ID NO: 41394 - DNA, 20 bp, Artificial Sequence
  Synthetic
caggcaagatggacaaaatg

SEQ ID NO: 41395 - DNA, 20 bp, Artificial Sequence
  Synthetic
aacattttctcaactgcatt

SEQ ID NO: 41396 - DNA, 20 bp, Artificial Sequence
  Synthetic
aatcatccatatctctttga

SEQ ID NO: 41397 - DNA, 20 bp, Artificial Sequence
  Synthetic
tctgctccatcaaagagata

SEQ ID NO: 41398 - DNA, 20 bp, Artificial Sequence
  Synthetic
atgccgttgatgcatatttc

SEQ ID NO: 41399 - DNA, 20 bp, Artificial Sequence
  Synthetic
tgccgttgatgcatatttca

SEQ ID NO: 41400 - DNA, 20 bp, Artificial Sequence
  Synthetic
ttccctgaaatatgcatcaa

SEQ ID NO: 41401 - DNA, 20 bp, Artificial Sequence
  Synthetic
tagtgaacctaaagcaccca

SEQ ID NO: 41402 - DNA, 20 bp, Artificial Sequence
  Synthetic
caactcaccttgggtgcttt

SEQ ID NO: 41403 - DNA, 20 bp, Artificial Sequence
  Synthetic
tgtgtcagtcaactcacctt

SEQ ID NO: 41404 - DNA, 20 bp, Artificial Sequence
  Synthetic
ttgggttgttttggaggtcg

SEQ ID NO: 41405 - DNA, 20 bp, Artificial Sequence
  Synthetic
tgaacattgggttgttttgg

SEQ ID NO: 41406 - DNA, 20 bp, Artificial Sequence
  Synthetic
tccaaaacaacccaatgttc

SEQ ID NO: 41407 - DNA, 20 bp, Artificial Sequence
  Synthetic
tcctgaacattgggttgttt

SEQ ID NO: 41408 - DNA, 20 bp, Artificial Sequence
  Synthetic
aactggaaatcctgaacatt

SEQ ID NO: 41409 - DNA, 20 bp, Artificial Sequence
  Synthetic
gaactggaaatcctgaacat

SEQ ID NO: 41410 - DNA, 20 bp, Artificial Sequence
  Synthetic
ataaacgtggaggaaagaac

SEQ ID NO: 41411 - DNA, 20 bp, Artificial Sequence
  Synthetic
agtaattcaaataaacgtgg

SEQ ID NO: 41412 - DNA, 20 bp, Artificial Sequence
  Synthetic
tccacgtttatttgaattac

SEQ ID NO: 41413 - DNA, 20 bp, Artificial Sequence
  Synthetic
tccagtaattcaaataaacg

SEQ ID NO: 41414 - DNA, 20 bp, Artificial Sequence
  Synthetic
ctgttttacagaaaaactat

SEQ ID NO: 41415 - DNA, 20 bp, Artificial Sequence
  Synthetic
tgttttacagaaaaactatt

SEQ ID NO: 41416 - DNA, 20 bp, Artificial Sequence
  Synthetic
cagaaaaactattgggtaca

SEQ ID NO: 41417 - DNA, 20 bp, Artificial Sequence
  Synthetic
ttaggcagctcaggatttcg

SEQ ID NO: 41418 - DNA, 20 bp, Artificial Sequence
  Synthetic
tgtgctgcattaggcagctc

SEQ ID NO: 41419 - DNA, 20 bp, Artificial Sequence
  Synthetic
tgagctgcctaatgcagcac

SEQ ID NO: 41420 - DNA, 20 bp, Artificial Sequence
  Synthetic
ttttgtgcctgtgctgcatt

SEQ ID NO: 41421 - DNA, 20 bp, Artificial Sequence
  Synthetic
ctctaactcttcatcattaa

SEQ ID NO: 41422 - DNA, 20 bp, Artificial Sequence
  Synthetic
cctctaactcttcatcatta

SEQ ID NO: 41423 - DNA, 20 bp, Artificial Sequence
  Synthetic
ccttaatgatgaagagttag

SEQ ID NO: 41424 - DNA, 20 bp, Artificial Sequence
  Synthetic
aaaagagaagcttctaacac

SEQ ID NO: 41425 - DNA, 20 bp, Artificial Sequence
  Synthetic
gtcactcaagccctatcaga

SEQ ID NO: 41426 - DNA, 20 bp, Artificial Sequence
  Synthetic
ctcaagccctatcagaaggt

SEQ ID NO: 41427 - DNA, 20 bp, Artificial Sequence
  Synthetic
ttcaaaccaaccttctgata

SEQ ID NO: 41428 - DNA, 20 bp, Artificial Sequence
  Synthetic
attcaaaccaaccttctgat

SEQ ID NO: 41429 - DNA, 20 bp, Artificial Sequence
  Synthetic
atcagaaggttggtttgaat

SEQ ID NO: 41430 - DNA, 20 bp, Artificial Sequence
  Synthetic
gaaggttggtttgaattggc

SEQ ID NO: 41431 - DNA, 20 bp, Artificial Sequence
  Synthetic
tggtttgaattggctggcat

SEQ ID NO: 41432 - DNA, 20 bp, Artificial Sequence
  Synthetic
ctggcattggtacataaaca

SEQ ID NO: 41433 - DNA, 20 bp, Artificial Sequence
  Synthetic
gtacataaacatggacttaa

SEQ ID NO: 41434 - DNA, 20 bp, Artificial Sequence
  Synthetic
acatggacttaatggcattt

SEQ ID NO: 41435 - DNA, 20 bp, Artificial Sequence
  Synthetic
tggcattttggcagatgaaa

SEQ ID NO: 41436 - DNA, 20 bp, Artificial Sequence
  Synthetic
ttttaaactttttagggcct

SEQ ID NO: 41437 - DNA, 20 bp, Artificial Sequence
  Synthetic
tggcttgaatagtttttcct

SEQ ID NO: 41438 - DNA, 20 bp, Artificial Sequence
  Synthetic
tattcaagccattgcatttc

SEQ ID NO: 41439 - DNA, 20 bp, Artificial Sequence
  Synthetic
gaggtatgccagaaatgcaa

SEQ ID NO: 41440 - DNA, 20 bp, Artificial Sequence
  Synthetic
atttctggcatacctctatc

SEQ ID NO: 41441 - DNA, 20 bp, Artificial Sequence
  Synthetic
tctggcatacctctatcagg

SEQ ID NO: 41442 - DNA, 20 bp, Artificial Sequence
  Synthetic
ctggcatacctctatcagga

SEQ ID NO: 41443 - DNA, 20 bp, Artificial Sequence
  Synthetic
cattattaccctcctgatag

SEQ ID NO: 41444 - DNA, 20 bp, Artificial Sequence
  Synthetic
ctctatcaggagggtaataa

SEQ ID NO: 41445 - DNA, 20 bp, Artificial Sequence
  Synthetic
gctggaacaacgatcaaatg

SEQ ID NO: 41446 - DNA, 20 bp, Artificial Sequence
  Synthetic
gttgttccagcttcaactat

SEQ ID NO: 41447 - DNA, 20 bp, Artificial Sequence
  Synthetic
tacaaacctatagttgaagc

SEQ ID NO: 41448 - DNA, 20 bp, Artificial Sequence
  Synthetic
tcttctgttccatagataac

SEQ ID NO: 41449 - DNA, 20 bp, Artificial Sequence
  Synthetic
gttccatagataactggtta

SEQ ID NO: 41450 - DNA, 20 bp, Artificial Sequence
  Synthetic
ttccatagataactggttaa

SEQ ID NO: 41451 - DNA, 20 bp, Artificial Sequence
  Synthetic
ggttaagggaagttaattta

SEQ ID NO: 41452 - DNA, 20 bp, Artificial Sequence
  Synthetic
tttatggtgccctactttga

SEQ ID NO: 41453 - DNA, 20 bp, Artificial Sequence
  Synthetic
aacagaggaccttcaaagta

SEQ ID NO: 41454 - DNA, 20 bp, Artificial Sequence
  Synthetic
taacagaggaccttcaaagt

SEQ ID NO: 41455 - DNA, 20 bp, Artificial Sequence
  Synthetic
ttgaaggtcctctgttacta

SEQ ID NO: 41456 - DNA, 20 bp, Artificial Sequence
  Synthetic
tattcttaccatagtaacag

SEQ ID NO: 41457 - DNA, 20 bp, Artificial Sequence
  Synthetic
atgaccgtagtctgtttcga

SEQ ID NO: 41458 - DNA, 20 bp, Artificial Sequence
  Synthetic
tcagccgtcgaaacagacta

SEQ ID NO: 41459 - DNA, 20 bp, Artificial Sequence
  Synthetic
taattacgcaatttttgatg

SEQ ID NO: 41460 - DNA, 20 bp, Artificial Sequence
  Synthetic
aattacgcaatttttgatga

SEQ ID NO: 41461 - DNA, 20 bp, Artificial Sequence
  Synthetic
gggccatatgctgaagaata

SEQ ID NO: 41462 - DNA, 20 bp, Artificial Sequence
  Synthetic
ggccatatgctgaagaatat

SEQ ID NO: 41463 - DNA, 20 bp, Artificial Sequence
  Synthetic
agcccatattcttcagcata

SEQ ID NO: 41464 - DNA, 20 bp, Artificial Sequence
  Synthetic
cataaggtgctggtagcgaa

SEQ ID NO: 41465 - DNA, 20 bp, Artificial Sequence
  Synthetic
cattaattgtcataaggtgc

SEQ ID NO: 41466 - DNA, 20 bp, Artificial Sequence
  Synthetic
ctcttacattaattgtcata

SEQ ID NO: 41467 - DNA, 20 bp, Artificial Sequence
  Synthetic
aataaccgtttgctgctcac

SEQ ID NO: 41468 - DNA, 20 bp, Artificial Sequence
  Synthetic
gtgtgcctgtgagcagcaaa

SEQ ID NO: 41469 - DNA, 20 bp, Artificial Sequence
  Synthetic
tctaacagattgttctgtac

SEQ ID NO: 41470 - DNA, 20 bp, Artificial Sequence
  Synthetic
gtgctactactaaacatgtg

SEQ ID NO: 41471 - DNA, 20 bp, Artificial Sequence
  Synthetic
aaacattcttcgtatttcac

SEQ ID NO: 41472 - DNA, 20 bp, Artificial Sequence
  Synthetic
atttatgcttactgtcttag

SEQ ID NO: 41473 - DNA, 20 bp, Artificial Sequence
  Synthetic
tgagcaaagcatatatgaaa

SEQ ID NO: 41474 - DNA, 20 bp, Artificial Sequence
  Synthetic
tttactcttctgagaataaa

SEQ ID NO: 41475 - DNA, 20 bp, Artificial Sequence
  Synthetic
tctcagaagagtaaaagaag

SEQ ID NO: 41476 - DNA, 20 bp, Artificial Sequence
  Synthetic
tcaattcgatctttcttggg

SEQ ID NO: 41477 - DNA, 20 bp, Artificial Sequence
  Synthetic
ctcaattcgatctttcttgg

SEQ ID NO: 41478 - DNA, 20 bp, Artificial Sequence
  Synthetic
actcaattcgatctttcttg

SEQ ID NO: 41479 - DNA, 20 bp, Artificial Sequence
  Synthetic
aactcaattcgatctttctt

SEQ ID NO: 41480 - DNA, 20 bp, Artificial Sequence
  Synthetic
caactcaattcgatctttct

SEQ ID NO: 41481 - DNA, 20 bp, Artificial Sequence
  Synthetic
aattgagttgtgtgcaatgt

SEQ ID NO: 41482 - DNA, 20 bp, Artificial Sequence
  Synthetic
gtgtgcaatgtcggagaagc

SEQ ID NO: 41483 - DNA, 20 bp, Artificial Sequence
  Synthetic
gaagcaggagcaactctatt

SEQ ID NO: 41484 - DNA, 20 bp, Artificial Sequence
  Synthetic
aagcaggagcaactctattt

SEQ ID NO: 41485 - DNA, 20 bp, Artificial Sequence
  Synthetic
gaaaaaatctatcaataact

SEQ ID NO: 41486 - DNA, 20 bp, Artificial Sequence
  Synthetic
aaaaaatctatcaataactt

SEQ ID NO: 41487 - DNA, 20 bp, Artificial Sequence
  Synthetic
gcaatgtcatgatgcagttg

SEQ ID NO: 41488 - DNA, 20 bp, Artificial Sequence
  Synthetic
catgatgcagttgaggaaaa

SEQ ID NO: 41489 - DNA, 20 bp, Artificial Sequence
  Synthetic
gcgatgtaataaaggatgat

SEQ ID NO: 41490 - DNA, 20 bp, Artificial Sequence
  Synthetic
taatattggcgatgtaataa

SEQ ID NO: 41491 - DNA, 20 bp, Artificial Sequence
  Synthetic
tgtcgtcagcgagcagcagg

SEQ ID NO: 41492 - DNA, 20 bp, Artificial Sequence
  Synthetic
ccatgtcgtcagcgagcagc

SEQ ID NO: 41493 - DNA, 20 bp, Artificial Sequence
  Synthetic
cctgctgctcgctgacgaca

SEQ ID NO: 41494 - DNA, 20 bp, Artificial Sequence
  Synthetic
ctgctgctcgctgacgacat

SEQ ID NO: 41495 - DNA, 20 bp, Artificial Sequence
  Synthetic
gctcgctgacgacatgggcc

SEQ ID NO: 41496 - DNA, 20 bp, Artificial Sequence
  Synthetic
ctcgctgacgacatgggcct

SEQ ID NO: 41497 - DNA, 20 bp, Artificial Sequence
  Synthetic
tcgctgacgacatgggcctg

SEQ ID NO: 41498 - DNA, 20 bp, Artificial Sequence
  Synthetic
tggcttggatggtcttcccc

SEQ ID NO: 41499 - DNA, 20 bp, Artificial Sequence
  Synthetic
tgcgatgcagatggcttgga

SEQ ID NO: 41500 - DNA, 20 bp, Artificial Sequence
  Synthetic
aggctgcgatgcagatggct

SEQ ID NO: 41501 - DNA, 20 bp, Artificial Sequence
  Synthetic
gtaaaaggctgcgatgcaga

SEQ ID NO: 41502 - DNA, 20 bp, Artificial Sequence
  Synthetic
tctgcatcgcagccttttac

SEQ ID NO: 41503 - DNA, 20 bp, Artificial Sequence
  Synthetic
catcgcagccttttaccgga

SEQ ID NO: 41504 - DNA, 20 bp, Artificial Sequence
  Synthetic
cagccttttaccggaaggag

SEQ ID NO: 41505 - DNA, 20 bp, Artificial Sequence
  Synthetic
cggccactccttccggtaaa

SEQ ID NO: 41506 - DNA, 20 bp, Artificial Sequence
  Synthetic
ccaggagcggccactccttc

SEQ ID NO: 41507 - DNA, 20 bp, Artificial Sequence
  Synthetic
ccggaaggagtggccgctcc

SEQ ID NO: 41508 - DNA, 20 bp, Artificial Sequence
  Synthetic
gaaggagtggccgctcctgg

SEQ ID NO: 41509 - DNA, 20 bp, Artificial Sequence
  Synthetic
ggagtggccgctcctggtgg

SEQ ID NO: 41510 - DNA, 20 bp, Artificial Sequence
  Synthetic
gatggcaccaccaccaggag

SEQ ID NO: 41511 - DNA, 20 bp, Artificial Sequence
  Synthetic
cggaggatggcaccaccacc

SEQ ID NO: 41512 - DNA, 20 bp, Artificial Sequence
  Synthetic
caggtgaagcgcacggagga

SEQ ID NO: 41513 - DNA, 20 bp, Artificial Sequence
  Synthetic
catcctccgtgcgcttcacc

SEQ ID NO: 41514 - DNA, 20 bp, Artificial Sequence
  Synthetic
atcctccgtgcgcttcacct

SEQ ID NO: 41515 - DNA, 20 bp, Artificial Sequence
  Synthetic
ctcccaggtgaagcgcacgg

SEQ ID NO: 41516 - DNA, 20 bp, Artificial Sequence
  Synthetic
ctgctcccaggtgaagcgca

SEQ ID NO: 41517 - DNA, 20 bp, Artificial Sequence
  Synthetic
cgtgcgcttcacctgggagc

SEQ ID NO: 41518 - DNA, 20 bp, Artificial Sequence
  Synthetic
aagaccattaacctgctccc

SEQ ID NO: 41519 - DNA, 20 bp, Artificial Sequence
  Synthetic
gtcatccacaggccttcctt

SEQ ID NO: 41520 - DNA, 20 bp, Artificial Sequence
  Synthetic
atccacaggccttccttcgg

SEQ ID NO: 41521 - DNA, 20 bp, Artificial Sequence
  Synthetic
agatggcagccaccgaagga

SEQ ID NO: 41522 - DNA, 20 bp, Artificial Sequence
  Synthetic
tcagagatggcagccaccga

SEQ ID NO: 41523 - DNA, 20 bp, Artificial Sequence
  Synthetic
atgcaatctgggctcagaga

SEQ ID NO: 41524 - DNA, 20 bp, Artificial Sequence
  Synthetic
ccacgacgttgatgcaatct

SEQ ID NO: 41525 - DNA, 20 bp, Artificial Sequence
  Synthetic
cccagattgcatcaacgtcg

SEQ ID NO: 41526 - DNA, 20 bp, Artificial Sequence
  Synthetic
accacgacgttgatgcaatc

SEQ ID NO: 41527 - DNA, 20 bp, Artificial Sequence
  Synthetic
tgcatcaacgtcgtggtgac

SEQ ID NO: 41528 - DNA, 20 bp, Artificial Sequence
  Synthetic
gcatcaacgtcgtggtgact

SEQ ID NO: 41529 - DNA, 20 bp, Artificial Sequence
  Synthetic
caacgtcgtggtgactggga

SEQ ID NO: 41530 - DNA, 20 bp, Artificial Sequence
  Synthetic
gggaaggaccgcctgacagc

SEQ ID NO: 41531 - DNA, 20 bp, Artificial Sequence
  Synthetic
tgatcaggccagctgtcagg

SEQ ID NO: 41532 - DNA, 20 bp, Artificial Sequence
  Synthetic
tgttgatcaggccagctgtc

SEQ ID NO: 41533 - DNA, 20 bp, Artificial Sequence
  Synthetic
caaagctgacaatgttgatc

SEQ ID NO: 41534 - DNA, 20 bp, Artificial Sequence
  Synthetic
ctttgaccttcttagcaagt

SEQ ID NO: 41535 - DNA, 20 bp, Artificial Sequence
  Synthetic
gtttttccaacttgctaaga

SEQ ID NO: 41536 - DNA, 20 bp, Artificial Sequence
  Synthetic
aatgatgacaactttaaaag

SEQ ID NO: 41537 - DNA, 20 bp, Artificial Sequence
  Synthetic
caatgatgacaactttaaaa

SEQ ID NO: 41538 - DNA, 20 bp, Artificial Sequence
  Synthetic
acaatgatgacaactttaaa

SEQ ID NO: 41539 - DNA, 20 bp, Artificial Sequence
  Synthetic
ctcacttcctcaaaaacagt

SEQ ID NO: 41540 - DNA, 20 bp, Artificial Sequence
  Synthetic
gggcagtcctactgtttttg

SEQ ID NO: 41541 - DNA, 20 bp, Artificial Sequence
  Synthetic
cggcatagctgctcgacagc

SEQ ID NO: 41542 - DNA, 20 bp, Artificial Sequence
  Synthetic
ccggcatagctgctcgacag

SEQ ID NO: 41543 - DNA, 20 bp, Artificial Sequence
  Synthetic
ccgctgtcgagcagctatgc

SEQ ID NO: 41544 - DNA, 20 bp, Artificial Sequence
  Synthetic
agcagctatgccggtcctaa

SEQ ID NO: 41545 - DNA, 20 bp, Artificial Sequence
  Synthetic
gaagtactcacctttaggac

SEQ ID NO: 41546 - DNA, 20 bp, Artificial Sequence
  Synthetic
tctcagaagtactcaccttt

SEQ ID NO: 41547 - DNA, 20 bp, Artificial Sequence
  Synthetic
ttgtcttttaggttgccaag

SEQ ID NO: 41548 - DNA, 20 bp, Artificial Sequence
  Synthetic
tgtcttttaggttgccaaga

SEQ ID NO: 41549 - DNA, 20 bp, Artificial Sequence
  Synthetic
cgacaacaggatcaccctct

SEQ ID NO: 41550 - DNA, 20 bp, Artificial Sequence
  Synthetic
caagagggtgatcctgttgt

SEQ ID NO: 41551 - DNA, 20 bp, Artificial Sequence
  Synthetic
aagagggtgatcctgttgtc

SEQ ID NO: 41552 - DNA, 20 bp, Artificial Sequence
  Synthetic
tggctggtgtgcccgacaac

SEQ ID NO: 41553 - DNA, 20 bp, Artificial Sequence
  Synthetic
cgggcacaccagccatgtcc

SEQ ID NO: 41554 - DNA, 20 bp, Artificial Sequence
  Synthetic
tctgcgggccgggacatggc

SEQ ID NO: 41555 - DNA, 20 bp, Artificial Sequence
  Synthetic
gagctctgcgggccgggaca

SEQ ID NO: 41556 - DNA, 20 bp, Artificial Sequence
  Synthetic
cgtgtagagctctgcgggcc

SEQ ID NO: 41557 - DNA, 20 bp, Artificial Sequence
  Synthetic
gcgtgtagagctctgcgggc

SEQ ID NO: 41558 - DNA, 20 bp, Artificial Sequence
  Synthetic
atctgcgtgtagagctctgc

SEQ ID NO: 41559 - DNA, 20 bp, Artificial Sequence
  Synthetic
gatctgcgtgtagagctctg

SEQ ID NO: 41560 - DNA, 20 bp, Artificial Sequence
  Synthetic
tgaaactgggggaagaaagt

SEQ ID NO: 41561 - DNA, 20 bp, Artificial Sequence
  Synthetic
ttcccccagtttcatgcctt

SEQ ID NO: 41562 - DNA, 20 bp, Artificial Sequence
  Synthetic
gtccaaaggcatgaaactgg

SEQ ID NO: 41563 - DNA, 20 bp, Artificial Sequence
  Synthetic
agtccaaaggcatgaaactg

SEQ ID NO: 41564 - DNA, 20 bp, Artificial Sequence
  Synthetic
aagtccaaaggcatgaaact

SEQ ID NO: 41565 - DNA, 20 bp, Artificial Sequence
  Synthetic
gaagtccaaaggcatgaaac

SEQ ID NO: 41566 - DNA, 20 bp, Artificial Sequence
  Synthetic
atcacagtagcgaagtccaa

SEQ ID NO: 41567 - DNA, 20 bp, Artificial Sequence
  Synthetic
ttcgctactgtgatgccaaa

SEQ ID NO: 41568 - DNA, 20 bp, Artificial Sequence
  Synthetic
tcgctactgtgatgccaaac

SEQ ID NO: 41569 - DNA, 20 bp, Artificial Sequence
  Synthetic
agagataatacatacccgtt

SEQ ID NO: 41570 - DNA, 20 bp, Artificial Sequence
  Synthetic
cttgttctctgcagatgcct

SEQ ID NO: 41571 - DNA, 20 bp, Artificial Sequence
  Synthetic
ttgttctctgcagatgcctt

SEQ ID NO: 41572 - DNA, 20 bp, Artificial Sequence
  Synthetic
tgttctctgcagatgccttg

SEQ ID NO: 41573 - DNA, 20 bp, Artificial Sequence
  Synthetic
gttctctgcagatgccttgg

SEQ ID NO: 41574 - DNA, 20 bp, Artificial Sequence
  Synthetic
ctctgcagatgccttggggg

SEQ ID NO: 41575 - DNA, 20 bp, Artificial Sequence
  Synthetic
tctgcagatgccttgggggt

SEQ ID NO: 41576 - DNA, 20 bp, Artificial Sequence
  Synthetic
cctgagtagtcccaccccca

SEQ ID NO: 41577 - DNA, 20 bp, Artificial Sequence
  Synthetic
ccttgggggtgggactactc

SEQ ID NO: 41578 - DNA, 20 bp, Artificial Sequence
  Synthetic
ctactcaggttcctccaacc

SEQ ID NO: 41579 - DNA, 20 bp, Artificial Sequence
  Synthetic
tactcaggttcctccaacct

SEQ ID NO: 41580 - DNA, 20 bp, Artificial Sequence
  Synthetic
cttcagctctcccaggttgg

SEQ ID NO: 41581 - DNA, 20 bp, Artificial Sequence
  Synthetic
gagcttcagctctcccaggt

SEQ ID NO: 41582 - DNA, 20 bp, Artificial Sequence
  Synthetic
gcaggagcttcagctctccc

SEQ ID NO: 41583 - DNA, 20 bp, Artificial Sequence
  Synthetic
gggagagctgaagctcctgc

SEQ ID NO: 41584 - DNA, 20 bp, Artificial Sequence
  Synthetic
agagctgaagctcctgctgg

SEQ ID NO: 41585 - DNA, 20 bp, Artificial Sequence
  Synthetic
gcatgactgcttcctccagc

SEQ ID NO: 41586 - DNA, 20 bp, Artificial Sequence
  Synthetic
tggaggaagcagtcatgctg

SEQ ID NO: 41587 - DNA, 20 bp, Artificial Sequence
  Synthetic
gggaaaggacgtcggacttg

SEQ ID NO: 41588 - DNA, 20 bp, Artificial Sequence
  Synthetic
aggcagctgggaaaggacgt

SEQ ID NO: 41589 - DNA, 20 bp, Artificial Sequence
  Synthetic
gcttggcaggcagctgggaa

SEQ ID NO: 41590 - DNA, 20 bp, Artificial Sequence
  Synthetic
gcgctgcttggcaggcagct

SEQ ID NO: 41591 - DNA, 20 bp, Artificial Sequence
  Synthetic
tgcgctgcttggcaggcagc

SEQ ID NO: 41592 - DNA, 20 bp, Artificial Sequence
  Synthetic
actatcttgcgctgcttggc

SEQ ID NO: 41593 - DNA, 20 bp, Artificial Sequence
  Synthetic
tgccaagcagcgcaagatag

SEQ ID NO: 41594 - DNA, 20 bp, Artificial Sequence
  Synthetic
caccactatcttgcgctgct

SEQ ID NO: 41595 - DNA, 20 bp, Artificial Sequence
  Synthetic
aagatagtggtgattgcccc

SEQ ID NO: 41596 - DNA, 20 bp, Artificial Sequence
  Synthetic
tgagaacgcatctcagcccg

SEQ ID NO: 41597 - DNA, 20 bp, Artificial Sequence
  Synthetic
cgcatctcagcccgaggtgc

SEQ ID NO: 41598 - DNA, 20 bp, Artificial Sequence
  Synthetic
cggatggggaccagcacctc

SEQ ID NO: 41599 - DNA, 20 bp, Artificial Sequence
  Synthetic
ccggatggggaccagcacct

SEQ ID NO: 41600 - DNA, 20 bp, Artificial Sequence
  Synthetic
ccgaggtgctggtccccatc

SEQ ID NO: 41601 - DNA, 20 bp, Artificial Sequence
  Synthetic
ggtgctggtccccatccggc

SEQ ID NO: 41602 - DNA, 20 bp, Artificial Sequence
  Synthetic
ggtccccatccggctggaca

SEQ ID NO: 41603 - DNA, 20 bp, Artificial Sequence
  Synthetic
tctccatgtccagccggatg

SEQ ID NO: 41604 - DNA, 20 bp, Artificial Sequence
  Synthetic
atctccatgtccagccggat

SEQ ID NO: 41605 - DNA, 20 bp, Artificial Sequence
  Synthetic
gatctccatgtccagccgga

SEQ ID NO: 41606 - DNA, 20 bp, Artificial Sequence
  Synthetic
catcgatctccatgtccagc

SEQ ID NO: 41607 - DNA, 20 bp, Artificial Sequence
  Synthetic
cggctggacatggagatcga

SEQ ID NO: 41608 - DNA, 20 bp, Artificial Sequence
  Synthetic
ggctggacatggagatcgat

SEQ ID NO: 41609 - DNA, 20 bp, Artificial Sequence
  Synthetic
agctgcgagacgccttcacc

SEQ ID NO: 41610 - DNA, 20 bp, Artificial Sequence
  Synthetic
gccttcacctggaacatgaa

SEQ ID NO: 41611 - DNA, 20 bp, Artificial Sequence
  Synthetic
accattcatgttccaggtga

SEQ ID NO: 41612 - DNA, 20 bp, Artificial Sequence
  Synthetic
ccttgtaccattcatgttcc

SEQ ID NO: 41613 - DNA, 20 bp, Artificial Sequence
  Synthetic
aggatttctgaaaacatctc

SEQ ID NO: 41614 - DNA, 20 bp, Artificial Sequence
  Synthetic
agaaatcctctgtgacgatc

SEQ ID NO: 41615 - DNA, 20 bp, Artificial Sequence
  Synthetic
tcaaatccagatcgtcacag

SEQ ID NO: 41616 - DNA, 20 bp, Artificial Sequence
  Synthetic
tggctggcacaaacgtcagc

SEQ ID NO: 41617 - DNA, 20 bp, Artificial Sequence
  Synthetic
atggctggcacaaacgtcag

SEQ ID NO: 41618 - DNA, 20 bp, Artificial Sequence
  Synthetic
ctgatggcagaggcgatggc

SEQ ID NO: 41619 - DNA, 20 bp, Artificial Sequence
  Synthetic
ctgtctgatggcagaggcga

SEQ ID NO: 41620 - DNA, 20 bp, Artificial Sequence
  Synthetic
gatctgctgtctgatggcag

SEQ ID NO: 41621 - DNA, 20 bp, Artificial Sequence
  Synthetic
ggactcgatctgctgtctga

SEQ ID NO: 41622 - DNA, 20 bp, Artificial Sequence
  Synthetic
gcagatcgagtcctacccca

SEQ ID NO: 41623 - DNA, 20 bp, Artificial Sequence
  Synthetic
caggatgctgtccgtggggt

SEQ ID NO: 41624 - DNA, 20 bp, Artificial Sequence
  Synthetic
ctaccccacggacagcatcc

SEQ ID NO: 41625 - DNA, 20 bp, Artificial Sequence
  Synthetic
cctccaggatgctgtccgtg

SEQ ID NO: 41626 - DNA, 20 bp, Artificial Sequence
  Synthetic
ccccacggacagcatcctgg

SEQ ID NO: 41627 - DNA, 20 bp, Artificial Sequence
  Synthetic
tcctccaggatgctgtccgt

SEQ ID NO: 41628 - DNA, 20 bp, Artificial Sequence
  Synthetic
gtcctccaggatgctgtccg

SEQ ID NO: 41629 - DNA, 20 bp, Artificial Sequence
  Synthetic
gctggtctgactggtcctcc

SEQ ID NO: 41630 - DNA, 20 bp, Artificial Sequence
  Synthetic
tgatgacgcgctggtctgac

SEQ ID NO: 41631 - DNA, 20 bp, Artificial Sequence
  Synthetic
agaccagcgcgtcatcatca

SEQ ID NO: 41632 - DNA, 20 bp, Artificial Sequence
  Synthetic
ctaccttgatgatgacgcgc

SEQ ID NO: 41633 - DNA, 20 bp, Artificial Sequence
  Synthetic
cagcgcgtcatcatcaaggt

SEQ ID NO: 41634 - DNA, 20 bp, Artificial Sequence
  Synthetic
gcctcagctgaacatccatg

SEQ ID NO: 41635 - DNA, 20 bp, Artificial Sequence
  Synthetic
cctcagctgaacatccatgt

SEQ ID NO: 41636 - DNA, 20 bp, Artificial Sequence
  Synthetic
ccagggaaatgtttcccaca

SEQ ID NO: 41637 - DNA, 20 bp, Artificial Sequence
  Synthetic
ccatgtgggaaacatttccc

SEQ ID NO: 41638 - DNA, 20 bp, Artificial Sequence
  Synthetic
tgtgggaaacatttccctgg

SEQ ID NO: 41639 - DNA, 20 bp, Artificial Sequence
  Synthetic
ccactcaaactggtccacca

SEQ ID NO: 41640 - DNA, 20 bp, Artificial Sequence
  Synthetic
ccctggtggaccagtttgag

SEQ ID NO: 41641 - DNA, 20 bp, Artificial Sequence
  Synthetic
cccactcaaactggtccacc

SEQ ID NO: 41642 - DNA, 20 bp, Artificial Sequence
  Synthetic
cctggtggaccagtttgagt

SEQ ID NO: 41643 - DNA, 20 bp, Artificial Sequence
  Synthetic
ctgacatgtcccactcaaac

SEQ ID NO: 41644 - DNA, 20 bp, Artificial Sequence
  Synthetic
tgagtgggacatgtcagaga

SEQ ID NO: 41645 - DNA, 20 bp, Artificial Sequence
  Synthetic
agcttcagggcaaacttctc

SEQ ID NO: 41646 - DNA, 20 bp, Artificial Sequence
  Synthetic
gtttgccctgaagctgtgct

SEQ ID NO: 41647 - DNA, 20 bp, Artificial Sequence
  Synthetic
cagctccgagcacagcttca

SEQ ID NO: 41648 - DNA, 20 bp, Artificial Sequence
  Synthetic
ccagctccgagcacagcttc

SEQ ID NO: 41649 - DNA, 20 bp, Artificial Sequence
  Synthetic
cctgaagctgtgctcggagc

SEQ ID NO: 41650 - DNA, 20 bp, Artificial Sequence
  Synthetic
ctgaagctgtgctcggagct

SEQ ID NO: 41651 - DNA, 20 bp, Artificial Sequence
  Synthetic
tgaagctgtgctcggagctg

SEQ ID NO: 41652 - DNA, 20 bp, Artificial Sequence
  Synthetic
gctgtgctcggagctggggt

SEQ ID NO: 41653 - DNA, 20 bp, Artificial Sequence
  Synthetic
ctgtgctcggagctggggtt

SEQ ID NO: 41654 - DNA, 20 bp, Artificial Sequence
  Synthetic
tgctcggagctggggttggg

SEQ ID NO: 41655 - DNA, 20 bp, Artificial Sequence
  Synthetic
gctcggagctggggttgggc

SEQ ID NO: 41656 - DNA, 20 bp, Artificial Sequence
  Synthetic
ctcggagctggggttgggcg

SEQ ID NO: 41657 - DNA, 20 bp, Artificial Sequence
  Synthetic
ccggatgctgtatgcgatgg

SEQ ID NO: 41658 - DNA, 20 bp, Artificial Sequence
  Synthetic
ccaccatcgcatacagcatc

SEQ ID NO: 41659 - DNA, 20 bp, Artificial Sequence
  Synthetic
caccatcgcatacagcatcc

SEQ ID NO: 41660 - DNA, 20 bp, Artificial Sequence
  Synthetic
accatcgcatacagcatccg

SEQ ID NO: 41661 - DNA, 20 bp, Artificial Sequence
  Synthetic
tccccggatgctgtatgcga

SEQ ID NO: 41662 - DNA, 20 bp, Artificial Sequence
  Synthetic
gcatccggggacagctgagc

SEQ ID NO: 41663 - DNA, 20 bp, Artificial Sequence
  Synthetic
gatgccagctcagctgtccc

SEQ ID NO: 41664 - DNA, 20 bp, Artificial Sequence
  Synthetic
atcagaagacctacgccttc

SEQ ID NO: 41665 - DNA, 20 bp, Artificial Sequence
  Synthetic
gaagacctacgccttcaggt

SEQ ID NO: 41666 - DNA, 20 bp, Artificial Sequence
  Synthetic
atgatcctacctgaaggcgt

SEQ ID NO: 41667 - DNA, 20 bp, Artificial Sequence
  Synthetic
tcatgcatgatcctacctga

SEQ ID NO: 41668 - DNA, 20 bp, Artificial Sequence
  Synthetic
cgagaaccctctgcccacag

SEQ ID NO: 41669 - DNA, 20 bp, Artificial Sequence
  Synthetic
caatctccactgtgggcaga

SEQ ID NO: 41670 - DNA, 20 bp, Artificial Sequence
  Synthetic
gcaatctccactgtgggcag

SEQ ID NO: 41671 - DNA, 20 bp, Artificial Sequence
  Synthetic
cggatggcaatctccactgt

SEQ ID NO: 41672 - DNA, 20 bp, Artificial Sequence
  Synthetic
ccggatggcaatctccactg

SEQ ID NO: 41673 - DNA, 20 bp, Artificial Sequence
  Synthetic
ccacagtggagattgccatc

SEQ ID NO: 41674 - DNA, 20 bp, Artificial Sequence
  Synthetic
ggagattgccatccggaaca

SEQ ID NO: 41675 - DNA, 20 bp, Artificial Sequence
  Synthetic
gagattgccatccggaacac

SEQ ID NO: 41676 - DNA, 20 bp, Artificial Sequence
  Synthetic
cgcatcgcccgtgttccgga

SEQ ID NO: 41677 - DNA, 20 bp, Artificial Sequence
  Synthetic
catccggaacacgggcgatg

SEQ ID NO: 41678 - DNA, 20 bp, Artificial Sequence
  Synthetic
ggtccgcatcgcccgtgttc

SEQ ID NO: 41679 - DNA, 20 bp, Artificial Sequence
  Synthetic
acacgggcgatgcggaccag

SEQ ID NO: 41680 - DNA, 20 bp, Artificial Sequence
  Synthetic
ggaccagtggtgcccactgc

SEQ ID NO: 41681 - DNA, 20 bp, Artificial Sequence
  Synthetic
tctccagcagtgggcaccac

SEQ ID NO: 41682 - DNA, 20 bp, Artificial Sequence
  Synthetic
ctgtcagagtctccagcagt

SEQ ID NO: 41683 - DNA, 20 bp, Artificial Sequence
  Synthetic
tctgtcagagtctccagcag

SEQ ID NO: 41684 - DNA, 20 bp, Artificial Sequence
  Synthetic
gactctgacagacgctgaga

SEQ ID NO: 41685 - DNA, 20 bp, Artificial Sequence
  Synthetic
ggagaagaagatccgcgacc

SEQ ID NO: 41686 - DNA, 20 bp, Artificial Sequence
  Synthetic
agaagatccgcgaccaggac

SEQ ID NO: 41687 - DNA, 20 bp, Artificial Sequence
  Synthetic
tcgtgttcctgtcctggtcg

SEQ ID NO: 41688 - DNA, 20 bp, Artificial Sequence
  Synthetic
gcgaccaggacaggaacacg

SEQ ID NO: 41689 - DNA, 20 bp, Artificial Sequence
  Synthetic
ggtacctcgtgttcctgtcc

SEQ ID NO: 41690 - DNA, 20 bp, Artificial Sequence
  Synthetic
tctcaatctcaatcagtttc

SEQ ID NO: 41691 - DNA, 20 bp, Artificial Sequence
  Synthetic
tgagaactttaagtcgtaca

SEQ ID NO: 41692 - DNA, 20 bp, Artificial Sequence
  Synthetic
gagaactttaagtcgtacaa

SEQ ID NO: 41693 - DNA, 20 bp, Artificial Sequence
  Synthetic
tacaagggtcgacagattat

SEQ ID NO: 41694 - DNA, 20 bp, Artificial Sequence
  Synthetic
agattatcggaccatttcag

SEQ ID NO: 41695 - DNA, 20 bp, Artificial Sequence
  Synthetic
atggcggtgaacctctgaaa

SEQ ID NO: 41696 - DNA, 20 bp, Artificial Sequence
  Synthetic
cagaggttcaccgccatcat

SEQ ID NO: 41697 - DNA, 20 bp, Artificial Sequence
  Synthetic
accgccatcattggacccaa

SEQ ID NO: 41698 - DNA, 20 bp, Artificial Sequence
  Synthetic
gccattgggtccaatgatgg

SEQ ID NO: 41699 - DNA, 20 bp, Artificial Sequence
  Synthetic
agagccattgggtccaatga

SEQ ID NO: 41700 - DNA, 20 bp, Artificial Sequence
  Synthetic
atcattggacccaatggctc

SEQ ID NO: 41701 - DNA, 20 bp, Artificial Sequence
  Synthetic
tttatctcaccagagccatt

SEQ ID NO: 41702 - DNA, 20 bp, Artificial Sequence
  Synthetic
gtttatctcaccagagccat

SEQ ID NO: 41703 - DNA, 20 bp, Artificial Sequence
  Synthetic
cttaggtaagtcaaatctca

SEQ ID NO: 41704 - DNA, 20 bp, Artificial Sequence
  Synthetic
gatgccatcagctttgtgct

SEQ ID NO: 41705 - DNA, 20 bp, Artificial Sequence
  Synthetic
ttcacctagcacaaagctga

SEQ ID NO: 41706 - DNA, 20 bp, Artificial Sequence
  Synthetic
gtgaaaaaaccagcaacctg

SEQ ID NO: 41707 - DNA, 20 bp, Artificial Sequence
  Synthetic
tgaaaaaaccagcaacctgc

SEQ ID NO: 41708 - DNA, 20 bp, Artificial Sequence
  Synthetic
ggtctttacccgcaggttgc

SEQ ID NO: 41709 - DNA, 20 bp, Artificial Sequence
  Synthetic
acctgcgggtaaagaccctg

SEQ ID NO: 41710 - DNA, 20 bp, Artificial Sequence
  Synthetic
cccgcagggtctttacccgc

SEQ ID NO: 41711 - DNA, 20 bp, Artificial Sequence
  Synthetic
cctgcgggtaaagaccctgc

SEQ ID NO: 41712 - DNA, 20 bp, Artificial Sequence
  Synthetic
accctgcgggacctgatcca

SEQ ID NO: 41713 - DNA, 20 bp, Artificial Sequence
  Synthetic
tccatggatcaggtcccgca

SEQ ID NO: 41714 - DNA, 20 bp, Artificial Sequence
  Synthetic
ctccatggatcaggtcccgc

SEQ ID NO: 41715 - DNA, 20 bp, Artificial Sequence
  Synthetic
ccacaggagctccatggatc

SEQ ID NO: 41716 - DNA, 20 bp, Artificial Sequence
  Synthetic
cctgatccatggagctcctg

SEQ ID NO: 41717 - DNA, 20 bp, Artificial Sequence
  Synthetic
ctgatccatggagctcctgt

SEQ ID NO: 41718 - DNA, 20 bp, Artificial Sequence
  Synthetic
gcttgcccacaggagctcca

SEQ ID NO: 41719 - DNA, 20 bp, Artificial Sequence
  Synthetic
ttggcagctggcttgcccac

SEQ ID NO: 41720 - DNA, 20 bp, Artificial Sequence
  Synthetic
tgggcaagccagctgccaac

SEQ ID NO: 41721 - DNA, 20 bp, Artificial Sequence
  Synthetic
gggcaagccagctgccaacc

SEQ ID NO: 41722 - DNA, 20 bp, Artificial Sequence
  Synthetic
acaaaggcccggttggcagc

SEQ ID NO: 41723 - DNA, 20 bp, Artificial Sequence
  Synthetic
catgctgacaaaggcccggt

SEQ ID NO: 41724 - DNA, 20 bp, Artificial Sequence
  Synthetic
caaccgggcctttgtcagca

SEQ ID NO: 41725 - DNA, 20 bp, Artificial Sequence
  Synthetic
agaccatgctgacaaaggcc

SEQ ID NO: 41726 - DNA, 20 bp, Artificial Sequence
  Synthetic
agagtagaccatgctgacaa

SEQ ID NO: 41727 - DNA, 20 bp, Artificial Sequence
  Synthetic
tgtcagcatggtctactctg

SEQ ID NO: 41728 - DNA, 20 bp, Artificial Sequence
  Synthetic
cagcatggtctactctgagg

SEQ ID NO: 41729 - DNA, 20 bp, Artificial Sequence
  Synthetic
agcatggtctactctgagga

SEQ ID NO: 41730 - DNA, 20 bp, Artificial Sequence
  Synthetic
ctactctgaggagggtgctg

SEQ ID NO: 41731 - DNA, 20 bp, Artificial Sequence
  Synthetic
caatgacacgggcaaaggta

SEQ ID NO: 41732 - DNA, 20 bp, Artificial Sequence
  Synthetic
acctttgcccgtgtcattgt

SEQ ID NO: 41733 - DNA, 20 bp, Artificial Sequence
  Synthetic
acctacaatgacacgggcaa

SEQ ID NO: 41734 - DNA, 20 bp, Artificial Sequence
  Synthetic
tttgcccgtgtcattgtagg

SEQ ID NO: 41735 - DNA, 20 bp, Artificial Sequence
  Synthetic
ttgcccgtgtcattgtaggt

SEQ ID NO: 41736 - DNA, 20 bp, Artificial Sequence
  Synthetic
tcacccacctacaatgacac

SEQ ID NO: 41737 - DNA, 20 bp, Artificial Sequence
  Synthetic
ctcacccacctacaatgaca

SEQ ID NO: 41738 - DNA, 20 bp, Artificial Sequence
  Synthetic
gtacaagatcaacaacaaag

SEQ ID NO: 41739 - DNA, 20 bp, Artificial Sequence
  Synthetic
cctcactgtactcatgtagt

SEQ ID NO: 41740 - DNA, 20 bp, Artificial Sequence
  Synthetic
ccaactacatgagtacagtg

SEQ ID NO: 41741 - DNA, 20 bp, Artificial Sequence
  Synthetic
cagtgaggaattagagaagt

SEQ ID NO: 41742 - DNA, 20 bp, Artificial Sequence
  Synthetic
agtgaggaattagagaagtt

SEQ ID NO: 41743 - DNA, 20 bp, Artificial Sequence
  Synthetic
tcgtaacttcctcgttttcc

SEQ ID NO: 41744 - DNA, 20 bp, Artificial Sequence
  Synthetic
taacttcctcgttttccagg

SEQ ID NO: 41745 - DNA, 20 bp, Artificial Sequence
  Synthetic
aacttcctcgttttccaggt

SEQ ID NO: 41746 - DNA, 20 bp, Artificial Sequence
  Synthetic
aaacgcccacctggaaaacg

SEQ ID NO: 41747 - DNA, 20 bp, Artificial Sequence
  Synthetic
cgacctttactagggtgctg

SEQ ID NO: 41748 - DNA, 20 bp, Artificial Sequence
  Synthetic
cctctctttggggttcttca

SEQ ID NO: 41749 - DNA, 20 bp, Artificial Sequence
  Synthetic
ccatgaagaaccccaaagag

SEQ ID NO: 41750 - DNA, 20 bp, Artificial Sequence
  Synthetic
atagagctgtcctctctttg

SEQ ID NO: 41751 - DNA, 20 bp, Artificial Sequence
  Synthetic
aatagagctgtcctctcttt

SEQ ID NO: 41752 - DNA, 20 bp, Artificial Sequence
  Synthetic
aaatagagctgtcctctctt

SEQ ID NO: 41753 - DNA, 20 bp, Artificial Sequence
  Synthetic
tttgaagagattagtcgttc

SEQ ID NO: 41754 - DNA, 20 bp, Artificial Sequence
  Synthetic
ttgaagagattagtcgttct

SEQ ID NO: 41755 - DNA, 20 bp, Artificial Sequence
  Synthetic
tgaagagattagtcgttctg

SEQ ID NO: 41756 - DNA, 20 bp, Artificial Sequence
  Synthetic
gattagtcgttctggggagc

SEQ ID NO: 41757 - DNA, 20 bp, Artificial Sequence
  Synthetic
tcgttctggggagctggcgc

SEQ ID NO: 41758 - DNA, 20 bp, Artificial Sequence
  Synthetic
ggagtatgacaagcgaaaga

SEQ ID NO: 41759 - DNA, 20 bp, Artificial Sequence
  Synthetic
tgacaagcgaaagaaggaaa

SEQ ID NO: 41760 - DNA, 20 bp, Artificial Sequence
  Synthetic
gcgaaagaaggaaatggtga

SEQ ID NO: 41761 - DNA, 20 bp, Artificial Sequence
  Synthetic
ggaaatggtgaaggctgaag

SEQ ID NO: 41762 - DNA, 20 bp, Artificial Sequence
  Synthetic
ccgcaatatttttcttgcga

SEQ ID NO: 41763 - DNA, 20 bp, Artificial Sequence
  Synthetic
ccatcgcaagaaaaatattg

SEQ ID NO: 41764 - DNA, 20 bp, Artificial Sequence
  Synthetic
aaatattgcggctgaacgca

SEQ ID NO: 41765 - DNA, 20 bp, Artificial Sequence
  Synthetic
tgaacgcaaggaagcaaagc

SEQ ID NO: 41766 - DNA, 20 bp, Artificial Sequence
  Synthetic
agcaaagcaggagaaagaag

SEQ ID NO: 41767 - DNA, 20 bp, Artificial Sequence
  Synthetic
aagcaggagaaagaagaggt

SEQ ID NO: 41768 - DNA, 20 bp, Artificial Sequence
  Synthetic
ccctgtttgcacaggctgac

SEQ ID NO: 41769 - DNA, 20 bp, Artificial Sequence
  Synthetic
tgaccggtaccagcgcctga

SEQ ID NO: 41770 - DNA, 20 bp, Artificial Sequence
  Synthetic
catccttcaggcgctggtac

SEQ ID NO: 41771 - DNA, 20 bp, Artificial Sequence
  Synthetic
gtaccagcgcctgaaggatg

SEQ ID NO: 41772 - DNA, 20 bp, Artificial Sequence
  Synthetic
ctacctcatccttcaggcgc

SEQ ID NO: 41773 - DNA, 20 bp, Artificial Sequence
  Synthetic
gcctgaaggatgaggtagta

SEQ ID NO: 41774 - DNA, 20 bp, Artificial Sequence
  Synthetic
cccgtactacctcatccttc

SEQ ID NO: 41775 - DNA, 20 bp, Artificial Sequence
  Synthetic
cctgaaggatgaggtagtac

SEQ ID NO: 41776 - DNA, 20 bp, Artificial Sequence
  Synthetic
ggatgaggtagtacgggctc

SEQ ID NO: 41777 - DNA, 20 bp, Artificial Sequence
  Synthetic
taagctttaccataatgaag

SEQ ID NO: 41778 - DNA, 20 bp, Artificial Sequence
  Synthetic
tctcaatttccacttcatta

SEQ ID NO: 41779 - DNA, 20 bp, Artificial Sequence
  Synthetic
ggaaattgagaagctcaaca

SEQ ID NO: 41780 - DNA, 20 bp, Artificial Sequence
  Synthetic
tgagaagctcaacaaggaac

SEQ ID NO: 41781 - DNA, 20 bp, Artificial Sequence
  Synthetic
ggaactggcctcaaagaaca

SEQ ID NO: 41782 - DNA, 20 bp, Artificial Sequence
  Synthetic
ctcgatctccttgttctttg

SEQ ID NO: 41783 - DNA, 20 bp, Artificial Sequence
  Synthetic
aaagaacaaggagatcgaga

SEQ ID NO: 41784 - DNA, 20 bp, Artificial Sequence
  Synthetic
cgagaaggacaagaagcgta

SEQ ID NO: 41785 - DNA, 20 bp, Artificial Sequence
  Synthetic
ggacaagaagcgtatggaca

SEQ ID NO: 41786 - DNA, 20 bp, Artificial Sequence
  Synthetic
caagaagcgtatggacaagg

SEQ ID NO: 41787 - DNA, 20 bp, Artificial Sequence
  Synthetic
gaagcgtatggacaaggtgg

SEQ ID NO: 41788 - DNA, 20 bp, Artificial Sequence
  Synthetic
caaggtggaggatgaactga

SEQ ID NO: 41789 - DNA, 20 bp, Artificial Sequence
  Synthetic
tgaactgaaggagaagaaga

SEQ ID NO: 41790 - DNA, 20 bp, Artificial Sequence
  Synthetic
gaaggagaagaagaaggagc

SEQ ID NO: 41791 - DNA, 20 bp, Artificial Sequence
  Synthetic
aaggagaagaagaaggagct

SEQ ID NO: 41792 - DNA, 20 bp, Artificial Sequence
  Synthetic
aggagctgggcaaaatgatg

SEQ ID NO: 41793 - DNA, 20 bp, Artificial Sequence
  Synthetic
ggagctgggcaaaatgatgc

SEQ ID NO: 41794 - DNA, 20 bp, Artificial Sequence
  Synthetic
ggagcagcagcagattgaga

SEQ ID NO: 41795 - DNA, 20 bp, Artificial Sequence
  Synthetic
cccctctggcaaaagggaga

SEQ ID NO: 41796 - DNA, 20 bp, Artificial Sequence
  Synthetic
actcagaattgaaccagaag

SEQ ID NO: 41797 - DNA, 20 bp, Artificial Sequence
  Synthetic
tgatgtactgaggccgcttc

SEQ ID NO: 41798 - DNA, 20 bp, Artificial Sequence
  Synthetic
gcctcagtacatcaaagcca

SEQ ID NO: 41799 - DNA, 20 bp, Artificial Sequence
  Synthetic
tccttggctttgatgtactg

SEQ ID NO: 41800 - DNA, 20 bp, Artificial Sequence
  Synthetic
tttgtgggaggtgttctcct

SEQ ID NO: 41801 - DNA, 20 bp, Artificial Sequence
  Synthetic
cagcttcttgattttgtggg

SEQ ID NO: 41802 - DNA, 20 bp, Artificial Sequence
  Synthetic
ctcccacaaaatcaagaagc

SEQ ID NO: 41803 - DNA, 20 bp, Artificial Sequence
  Synthetic
ttccagcttcttgattttgt

SEQ ID NO: 41804 - DNA, 20 bp, Artificial Sequence
  Synthetic
cttccagcttcttgattttg

SEQ ID NO: 41805 - DNA, 20 bp, Artificial Sequence
  Synthetic
agcattctgcagagacttct

SEQ ID NO: 41806 - DNA, 20 bp, Artificial Sequence
  Synthetic
aagcactacaagaagcgtaa

SEQ ID NO: 41807 - DNA, 20 bp, Artificial Sequence
  Synthetic
caagaagcgtaaaggtgaca

SEQ ID NO: 41808 - DNA, 20 bp, Artificial Sequence
  Synthetic
taaaggtgacatggatgagc

SEQ ID NO: 41809 - DNA, 20 bp, Artificial Sequence
  Synthetic
tgacatggatgagctggaga

SEQ ID NO: 41810 - DNA, 20 bp, Artificial Sequence
  Synthetic
ggagaaggagatgctgtcag

SEQ ID NO: 41811 - DNA, 20 bp, Artificial Sequence
  Synthetic
ggagatgctgtcagtggaga

SEQ ID NO: 41812 - DNA, 20 bp, Artificial Sequence
  Synthetic
tgctgtcagtggagaaggct

SEQ ID NO: 41813 - DNA, 20 bp, Artificial Sequence
  Synthetic
gtcagtggagaaggctcggc

SEQ ID NO: 41814 - DNA, 20 bp, Artificial Sequence
  Synthetic
ctcggcaggagtttgaagaa

SEQ ID NO: 41815 - DNA, 20 bp, Artificial Sequence
  Synthetic
gcaggagtttgaagaacgga

SEQ ID NO: 41816 - DNA, 20 bp, Artificial Sequence
  Synthetic
ggaagaagagagtcagagtc

SEQ ID NO: 41817 - DNA, 20 bp, Artificial Sequence
  Synthetic
gaagaagagagtcagagtca

SEQ ID NO: 41818 - DNA, 20 bp, Artificial Sequence
  Synthetic
tcagggcagagatttgacgt

SEQ ID NO: 41819 - DNA, 20 bp, Artificial Sequence
  Synthetic
gggcagagatttgacgttgg

SEQ ID NO: 41820 - DNA, 20 bp, Artificial Sequence
  Synthetic
tttgacgttggaggagaatc

SEQ ID NO: 41821 - DNA, 20 bp, Artificial Sequence
  Synthetic
cacaggtgaagaaataccac

SEQ ID NO: 41822 - DNA, 20 bp, Artificial Sequence
  Synthetic
tggcttcttctttcaaccgg

SEQ ID NO: 41823 - DNA, 20 bp, Artificial Sequence
  Synthetic
tgctggcttcttctttcaac

SEQ ID NO: 41824 - DNA, 20 bp, Artificial Sequence
  Synthetic
cagggtagctgctctcttgc

SEQ ID NO: 41825 - DNA, 20 bp, Artificial Sequence
  Synthetic
cagcaagagagcagctaccc

SEQ ID NO: 41826 - DNA, 20 bp, Artificial Sequence
  Synthetic
gagagcagctaccctggccc

SEQ ID NO: 41827 - DNA, 20 bp, Artificial Sequence
  Synthetic
agctaccctggcccaggagc

SEQ ID NO: 41828 - DNA, 20 bp, Artificial Sequence
  Synthetic
tttctccagctcctgggcca

SEQ ID NO: 41829 - DNA, 20 bp, Artificial Sequence
  Synthetic
atttctccagctcctgggcc

SEQ ID NO: 41830 - DNA, 20 bp, Artificial Sequence
  Synthetic
attgaatttctccagctcct

SEQ ID NO: 41831 - DNA, 20 bp, Artificial Sequence
  Synthetic
gattgaatttctccagctcc

SEQ ID NO: 41832 - DNA, 20 bp, Artificial Sequence
  Synthetic
tcgagaccagaaagctgacc

SEQ ID NO: 41833 - DNA, 20 bp, Artificial Sequence
  Synthetic
gacggtcctggtcagctttc

SEQ ID NO: 41834 - DNA, 20 bp, Artificial Sequence
  Synthetic
gaaagctgaccaggaccgtc

SEQ ID NO: 41835 - DNA, 20 bp, Artificial Sequence
  Synthetic
tgaccaggaccgtctggatc

SEQ ID NO: 41836 - DNA, 20 bp, Artificial Sequence
  Synthetic
cttccagatccagacggtcc

SEQ ID NO: 41837 - DNA, 20 bp, Artificial Sequence
  Synthetic
accgtctggatctggaagaa

SEQ ID NO: 41838 - DNA, 20 bp, Artificial Sequence
  Synthetic
tccgttcttccagatccaga

SEQ ID NO: 41839 - DNA, 20 bp, Artificial Sequence
  Synthetic
acggaagaaagtagagacag

SEQ ID NO: 41840 - DNA, 20 bp, Artificial Sequence
  Synthetic
gaagaaagtagagacagagg

SEQ ID NO: 41841 - DNA, 20 bp, Artificial Sequence
  Synthetic
aagaaagtagagacagaggt

SEQ ID NO: 41842 - DNA, 20 bp, Artificial Sequence
  Synthetic
gcttttgcttgatcttggcc

SEQ ID NO: 41843 - DNA, 20 bp, Artificial Sequence
  Synthetic
ccgcagcttttgcttgatct

SEQ ID NO: 41844 - DNA, 20 bp, Artificial Sequence
  Synthetic
ccaagatcaagcaaaagctg

SEQ ID NO: 41845 - DNA, 20 bp, Artificial Sequence
  Synthetic
caagatcaagcaaaagctgc

SEQ ID NO: 41846 - DNA, 20 bp, Artificial Sequence
  Synthetic
aaattgaagagaatcagaag

SEQ ID NO: 41847 - DNA, 20 bp, Artificial Sequence
  Synthetic
tcagaagcggattgagaaac

SEQ ID NO: 41848 - DNA, 20 bp, Artificial Sequence
  Synthetic
gaagcggattgagaaactgg

SEQ ID NO: 41849 - DNA, 20 bp, Artificial Sequence
  Synthetic
cagagctacatacttgctag

SEQ ID NO: 41850 - DNA, 20 bp, Artificial Sequence
  Synthetic
tagcttcttctgctcttcta

SEQ ID NO: 41851 - DNA, 20 bp, Artificial Sequence
  Synthetic
ctagcttcttctgctcttct

SEQ ID NO: 41852 - DNA, 20 bp, Artificial Sequence
  Synthetic
agaagagcagaagaagctag

SEQ ID NO: 41853 - DNA, 20 bp, Artificial Sequence
  Synthetic
gaagagcagaagaagctaga

SEQ ID NO: 41854 - DNA, 20 bp, Artificial Sequence
  Synthetic
aagagcagaagaagctagag

SEQ ID NO: 41855 - DNA, 20 bp, Artificial Sequence
  Synthetic
agagcagaagaagctagagg

SEQ ID NO: 41856 - DNA, 20 bp, Artificial Sequence
  Synthetic
gctagagggggagctgacag

SEQ ID NO: 41857 - DNA, 20 bp, Artificial Sequence
  Synthetic
agagggggagctgacagagg

SEQ ID NO: 41858 - DNA, 20 bp, Artificial Sequence
  Synthetic
gggggagctgacagaggagg

SEQ ID NO: 41859 - DNA, 20 bp, Artificial Sequence
  Synthetic
gctgacagaggaggtggaga

SEQ ID NO: 41860 - DNA, 20 bp, Artificial Sequence
  Synthetic
aggaggtggagatggccaag

SEQ ID NO: 41861 - DNA, 20 bp, Artificial Sequence
  Synthetic
gatttcatcaatacgccgct

SEQ ID NO: 41862 - DNA, 20 bp, Artificial Sequence
  Synthetic
gcgtattgatgaaatcaata

SEQ ID NO: 41863 - DNA, 20 bp, Artificial Sequence
  Synthetic
aatcaataaggagctgaacc

SEQ ID NO: 41864 - DNA, 20 bp, Artificial Sequence
  Synthetic
taaggagctgaaccaggtga

SEQ ID NO: 41865 - DNA, 20 bp, Artificial Sequence
  Synthetic
aaccaggtgatggagcagct

SEQ ID NO: 41866 - DNA, 20 bp, Artificial Sequence
  Synthetic
accaggtgatggagcagcta

SEQ ID NO: 41867 - DNA, 20 bp, Artificial Sequence
  Synthetic
cccctagctgctccatcacc

SEQ ID NO: 41868 - DNA, 20 bp, Artificial Sequence
  Synthetic
ccaggtgatggagcagctag

SEQ ID NO: 41869 - DNA, 20 bp, Artificial Sequence
  Synthetic
ggatgcccgcatcgaccgcc

SEQ ID NO: 41870 - DNA, 20 bp, Artificial Sequence
  Synthetic
gctctcctggcggtcgatgc

SEQ ID NO: 41871 - DNA, 20 bp, Artificial Sequence
  Synthetic
tgctctcctggcggtcgatg

SEQ ID NO: 41872 - DNA, 20 bp, Artificial Sequence
  Synthetic
gctggcggctgctctcctgg

SEQ ID NO: 41873 - DNA, 20 bp, Artificial Sequence
  Synthetic
gctgctggcggctgctctcc

SEQ ID NO: 41874 - DNA, 20 bp, Artificial Sequence
  Synthetic
gagcagccgccagcagcgaa

SEQ ID NO: 41875 - DNA, 20 bp, Artificial Sequence
  Synthetic
tctctgcctttcgctgctgg

SEQ ID NO: 41876 - DNA, 20 bp, Artificial Sequence
  Synthetic
ttatctctgcctttcgctgc

SEQ ID NO: 41877 - DNA, 20 bp, Artificial Sequence
  Synthetic
gcagcgaaaggcagagataa

SEQ ID NO: 41878 - DNA, 20 bp, Artificial Sequence
  Synthetic
agcatcaagcgcctttaccc

SEQ ID NO: 41879 - DNA, 20 bp, Artificial Sequence
  Synthetic
gcgcctttaccctggctctg

SEQ ID NO: 41880 - DNA, 20 bp, Artificial Sequence
  Synthetic
ttaccacagagccagggtaa

SEQ ID NO: 41881 - DNA, 20 bp, Artificial Sequence
  Synthetic
ctgctcttaccacagagcca

SEQ ID NO: 41882 - DNA, 20 bp, Artificial Sequence
  Synthetic
tctgctcttaccacagagcc

SEQ ID NO: 41883 - DNA, 20 bp, Artificial Sequence
  Synthetic
gctggcataggtcaatgagg

SEQ ID NO: 41884 - DNA, 20 bp, Artificial Sequence
  Synthetic
tgggctggcataggtcaatg

SEQ ID NO: 41885 - DNA, 20 bp, Artificial Sequence
  Synthetic
tcttttgtgtgggctggcat

SEQ ID NO: 41886 - DNA, 20 bp, Artificial Sequence
  Synthetic
gatacttcttttgtgtgggc

SEQ ID NO: 41887 - DNA, 20 bp, Artificial Sequence
  Synthetic
atctgatacttcttttgtgt

SEQ ID NO: 41888 - DNA, 20 bp, Artificial Sequence
  Synthetic
aatctgatacttcttttgtg

SEQ ID NO: 41889 - DNA, 20 bp, Artificial Sequence
  Synthetic
gtatcagattgctgtaacca

SEQ ID NO: 41890 - DNA, 20 bp, Artificial Sequence
  Synthetic
gattgctgtaaccaaggttt

SEQ ID NO: 41891 - DNA, 20 bp, Artificial Sequence
  Synthetic
attgctgtaaccaaggtttt

SEQ ID NO: 41892 - DNA, 20 bp, Artificial Sequence
  Synthetic
catgttcttgcccaaaacct

SEQ ID NO: 41893 - DNA, 20 bp, Artificial Sequence
  Synthetic
caaggttttgggcaagaaca

SEQ ID NO: 41894 - DNA, 20 bp, Artificial Sequence
  Synthetic
gaacatggatgccattattg

SEQ ID NO: 41895 - DNA, 20 bp, Artificial Sequence
  Synthetic
ggatgccattattgtggact

SEQ ID NO: 41896 - DNA, 20 bp, Artificial Sequence
  Synthetic
cttctccgagtccacaataa

SEQ ID NO: 41897 - DNA, 20 bp, Artificial Sequence
  Synthetic
attgtggactcggagaagac

SEQ ID NO: 41898 - DNA, 20 bp, Artificial Sequence
  Synthetic
tggactcggagaagacaggc

SEQ ID NO: 41899 - DNA, 20 bp, Artificial Sequence
  Synthetic
ggactcggagaagacaggcc

SEQ ID NO: 41900 - DNA, 20 bp, Artificial Sequence
  Synthetic
tgatatactgaatacagtcc

SEQ ID NO: 41901 - DNA, 20 bp, Artificial Sequence
  Synthetic
ggactgtattcagtatatca

SEQ ID NO: 41902 - DNA, 20 bp, Artificial Sequence
  Synthetic
cagtatatcaaggagcagcg

SEQ ID NO: 41903 - DNA, 20 bp, Artificial Sequence
  Synthetic
agtatatcaaggagcagcgt

SEQ ID NO: 41904 - DNA, 20 bp, Artificial Sequence
  Synthetic
gtatatcaaggagcagcgtg

SEQ ID NO: 41905 - DNA, 20 bp, Artificial Sequence
  Synthetic
tcaagaggcaagaaggtctc

SEQ ID NO: 41906 - DNA, 20 bp, Artificial Sequence
  Synthetic
caggtagtcaagaggcaaga

SEQ ID NO: 41907 - DNA, 20 bp, Artificial Sequence
  Synthetic
cttcttgcctcttgactacc

SEQ ID NO: 41908 - DNA, 20 bp, Artificial Sequence
  Synthetic
cttgcctcttgactacctgg

SEQ ID NO: 41909 - DNA, 20 bp, Artificial Sequence
  Synthetic
ctcacctccaggtagtcaag

SEQ ID NO: 41910 - DNA, 20 bp, Artificial Sequence
  Synthetic
ccccaacaagcctcacctcc

SEQ ID NO: 41911 - DNA, 20 bp, Artificial Sequence
  Synthetic
agcctacagatgagaaactc

SEQ ID NO: 41912 - DNA, 20 bp, Artificial Sequence
  Synthetic
gcctacagatgagaaactcc

SEQ ID NO: 41913 - DNA, 20 bp, Artificial Sequence
  Synthetic
tcccggagtttctcatctgt

SEQ ID NO: 41914 - DNA, 20 bp, Artificial Sequence
  Synthetic
tgagaaactccgggagctga

SEQ ID NO: 41915 - DNA, 20 bp, Artificial Sequence
  Synthetic
gagaaactccgggagctgaa

SEQ ID NO: 41916 - DNA, 20 bp, Artificial Sequence
  Synthetic
agaaactccgggagctgaag

SEQ ID NO: 41917 - DNA, 20 bp, Artificial Sequence
  Synthetic
gaaactccgggagctgaagg

SEQ ID NO: 41918 - DNA, 20 bp, Artificial Sequence
  Synthetic
gcttggcccccttcagctcc

SEQ ID NO: 41919 - DNA, 20 bp, Artificial Sequence
  Synthetic
aatcacatcaatcactagct

SEQ ID NO: 41920 - DNA, 20 bp, Artificial Sequence
  Synthetic
tgagccacctcatatcaaaa

SEQ ID NO: 41921 - DNA, 20 bp, Artificial Sequence
  Synthetic
agggcctttttgatatgagg

SEQ ID NO: 41922 - DNA, 20 bp, Artificial Sequence
  Synthetic
tgcagggcctttttgatatg

SEQ ID NO: 41923 - DNA, 20 bp, Artificial Sequence
  Synthetic
aaggccctgcagtatgcttg

SEQ ID NO: 41924 - DNA, 20 bp, Artificial Sequence
  Synthetic
attgccacaagcatactgca

SEQ ID NO: 41925 - DNA, 20 bp, Artificial Sequence
  Synthetic
cattgccacaagcatactgc

SEQ ID NO: 41926 - DNA, 20 bp, Artificial Sequence
  Synthetic
tgcccttgtctgtgacaacg

SEQ ID NO: 41927 - DNA, 20 bp, Artificial Sequence
  Synthetic
ttccacgttgtcacagacaa

SEQ ID NO: 41928 - DNA, 20 bp, Artificial Sequence
  Synthetic
cttccacgttgtcacagaca

SEQ ID NO: 41929 - DNA, 20 bp, Artificial Sequence
  Synthetic
gatgcccgccgcattgcctt

SEQ ID NO: 41930 - DNA, 20 bp, Artificial Sequence
  Synthetic
gcccgccgcattgcctttgg

SEQ ID NO: 41931 - DNA, 20 bp, Artificial Sequence
  Synthetic
gcctccaaaggcaatgcggc

SEQ ID NO: 41932 - DNA, 20 bp, Artificial Sequence
  Synthetic
ggcctccaaaggcaatgcgg

SEQ ID NO: 41933 - DNA, 20 bp, Artificial Sequence
  Synthetic
ggtggcctccaaaggcaatg

SEQ ID NO: 41934 - DNA, 20 bp, Artificial Sequence
  Synthetic
gtggcgctggtggcctccaa

SEQ ID NO: 41935 - DNA, 20 bp, Artificial Sequence
  Synthetic
tggaggccaccagcgccaca

SEQ ID NO: 41936 - DNA, 20 bp, Artificial Sequence
  Synthetic
tccacaccttgtggcgctgg

SEQ ID NO: 41937 - DNA, 20 bp, Artificial Sequence
  Synthetic
gaatccacaccttgtggcgc

SEQ ID NO: 41938 - DNA, 20 bp, Artificial Sequence
  Synthetic
gcaagggaatccacaccttg

SEQ ID NO: 41939 - DNA, 20 bp, Artificial Sequence
  Synthetic
cccctgctgtgtgtagacag

SEQ ID NO: 41940 - DNA, 20 bp, Artificial Sequence
  Synthetic
ctgtgtgtagacagtggcac

SEQ ID NO: 41941 - DNA, 20 bp, Artificial Sequence
  Synthetic
gtgtagacagtggcactgga

SEQ ID NO: 41942 - DNA, 20 bp, Artificial Sequence
  Synthetic
ggaaccctattccagaagtc

SEQ ID NO: 41943 - DNA, 20 bp, Artificial Sequence
  Synthetic
cactcctgacttctggaata

SEQ ID NO: 41944 - DNA, 20 bp, Artificial Sequence
  Synthetic
tcactcctgacttctggaat

SEQ ID NO: 41945 - DNA, 20 bp, Artificial Sequence
  Synthetic
cagagatcactcctgacttc

SEQ ID NO: 41946 - DNA, 20 bp, Artificial Sequence
  Synthetic
cagaagtcaggagtgatctc

SEQ ID NO: 41947 - DNA, 20 bp, Artificial Sequence
  Synthetic
aagtcaggagtgatctctgg

SEQ ID NO: 41948 - DNA, 20 bp, Artificial Sequence
  Synthetic
agtcaggagtgatctctggt

SEQ ID NO: 41949 - DNA, 20 bp, Artificial Sequence
  Synthetic
gtcaggagtgatctctggtg

SEQ ID NO: 41950 - DNA, 20 bp, Artificial Sequence
  Synthetic
tggtggggccagtgacctga

SEQ ID NO: 41951 - DNA, 20 bp, Artificial Sequence
  Synthetic
ggccagtgacctgaaggcca

SEQ ID NO: 41952 - DNA, 20 bp, Artificial Sequence
  Synthetic
tgccttggccttcaggtcac

SEQ ID NO: 41953 - DNA, 20 bp, Artificial Sequence
  Synthetic
gtgacctgaaggccaaggca

SEQ ID NO: 41954 - DNA, 20 bp, Artificial Sequence
  Synthetic
agcgccgtgccttggccttc

SEQ ID NO: 41955 - DNA, 20 bp, Artificial Sequence
  Synthetic
tgaaggccaaggcacggcgc

SEQ ID NO: 41956 - DNA, 20 bp, Artificial Sequence
  Synthetic
gaaggccaaggcacggcgct

SEQ ID NO: 41957 - DNA, 20 bp, Artificial Sequence
  Synthetic
ctcatcccagcgccgtgcct

SEQ ID NO: 41958 - DNA, 20 bp, Artificial Sequence
  Synthetic
agacaagttgaaagagaaga

SEQ ID NO: 41959 - DNA, 20 bp, Artificial Sequence
  Synthetic
gaagaaggagcgcttgacag

SEQ ID NO: 41960 - DNA, 20 bp, Artificial Sequence
  Synthetic
ttcccttcaggagcagatga

SEQ ID NO: 41961 - DNA, 20 bp, Artificial Sequence
  Synthetic
aggagcagatgaaggcaaaa

SEQ ID NO: 41962 - DNA, 20 bp, Artificial Sequence
  Synthetic
gatgaaggcaaaacggaaag

SEQ ID NO: 41963 - DNA, 20 bp, Artificial Sequence
  Synthetic
gaaagaggcagagctgcgtc

SEQ ID NO: 41964 - DNA, 20 bp, Artificial Sequence
  Synthetic
gctgcgtcaggtgcagtctc

SEQ ID NO: 41965 - DNA, 20 bp, Artificial Sequence
  Synthetic
caggtgcagtctcaggccca

SEQ ID NO: 41966 - DNA, 20 bp, Artificial Sequence
  Synthetic
aggcccatggactgcagatg

SEQ ID NO: 41967 - DNA, 20 bp, Artificial Sequence
  Synthetic
gagccgcatctgcagtccat

SEQ ID NO: 41968 - DNA, 20 bp, Artificial Sequence
  Synthetic
tgagccgcatctgcagtcca

SEQ ID NO: 41969 - DNA, 20 bp, Artificial Sequence
  Synthetic
ggtctgttctaggtcactct

SEQ ID NO: 41970 - DNA, 20 bp, Artificial Sequence
  Synthetic
tggtctgttctaggtcactc

SEQ ID NO: 41971 - DNA, 20 bp, Artificial Sequence
  Synthetic
gtcgtgtcttggtctgttct

SEQ ID NO: 41972 - DNA, 20 bp, Artificial Sequence
  Synthetic
cagggctagatgtcgtgtct

SEQ ID NO: 41973 - DNA, 20 bp, Artificial Sequence
  Synthetic
acatctagccctgaatctgc

SEQ ID NO: 41974 - DNA, 20 bp, Artificial Sequence
  Synthetic
tctagccctgaatctgcagg

SEQ ID NO: 41975 - DNA, 20 bp, Artificial Sequence
  Synthetic
ctagccctgaatctgcaggt

SEQ ID NO: 41976 - DNA, 20 bp, Artificial Sequence
  Synthetic
aggccccacctgcagattca

SEQ ID NO: 41977 - DNA, 20 bp, Artificial Sequence
  Synthetic
caggccccacctgcagattc

SEQ ID NO: 41978 - DNA, 20 bp, Artificial Sequence
  Synthetic
cctgtaggaaaaatccaagc

SEQ ID NO: 41979 - DNA, 20 bp, Artificial Sequence
  Synthetic
ggctagctcactctccagct

SEQ ID NO: 41980 - DNA, 20 bp, Artificial Sequence
  Synthetic
gagagtgagctagccaactt

SEQ ID NO: 41981 - DNA, 20 bp, Artificial Sequence
  Synthetic
agagtgagctagccaacttt

SEQ ID NO: 41982 - DNA, 20 bp, Artificial Sequence
  Synthetic
attaatgcgaggcccaaagt

SEQ ID NO: 41983 - DNA, 20 bp, Artificial Sequence
  Synthetic
ctcttgatatcattaatgcg

SEQ ID NO: 41984 - DNA, 20 bp, Artificial Sequence
  Synthetic
ctcgcattaatgatatcaag

SEQ ID NO: 41985 - DNA, 20 bp, Artificial Sequence
  Synthetic
ggatcattcagagccgagag

SEQ ID NO: 41986 - DNA, 20 bp, Artificial Sequence
  Synthetic
gatcattcagagccgagaga

SEQ ID NO: 41987 - DNA, 20 bp, Artificial Sequence
  Synthetic
agtctttcatttccctctct

SEQ ID NO: 41988 - DNA, 20 bp, Artificial Sequence
  Synthetic
gagggaaatgaaagacttga

SEQ ID NO: 41989 - DNA, 20 bp, Artificial Sequence
  Synthetic
cttgaaggagaagatgaacc

SEQ ID NO: 41990 - DNA, 20 bp, Artificial Sequence
  Synthetic
aaggagaagatgaaccaggt

SEQ ID NO: 41991 - DNA, 20 bp, Artificial Sequence
  Synthetic
tggcttctcttctcaggtag

SEQ ID NO: 41992 - DNA, 20 bp, Artificial Sequence
  Synthetic
ctcttctcaggtagaggatg

SEQ ID NO: 41993 - DNA, 20 bp, Artificial Sequence
  Synthetic
aggtgtttgaagagttttgt

SEQ ID NO: 41994 - DNA, 20 bp, Artificial Sequence
  Synthetic
ggtgtttgaagagttttgtc

SEQ ID NO: 41995 - DNA, 20 bp, Artificial Sequence
  Synthetic
gaagagttttgtcgggagat

SEQ ID NO: 41996 - DNA, 20 bp, Artificial Sequence
  Synthetic
agattggtgtgcgcaacatc

SEQ ID NO: 41997 - DNA, 20 bp, Artificial Sequence
  Synthetic
gattggtgtgcgcaacatcc

SEQ ID NO: 41998 - DNA, 20 bp, Artificial Sequence
  Synthetic
gcgcaacatccgggagtttg

SEQ ID NO: 41999 - DNA, 20 bp, Artificial Sequence
  Synthetic
ccttttcttcctcaaactcc

SEQ ID NO: 42000 - DNA, 20 bp, Artificial Sequence
  Synthetic
ccgggagtttgaggaagaaa

SEQ ID NO: 42001 - DNA, 20 bp, Artificial Sequence
  Synthetic
ttgaggaagaaaaggtgaaa

SEQ ID NO: 42002 - DNA, 20 bp, Artificial Sequence
  Synthetic
agaatgaaatcgccaagaag

SEQ ID NO: 42003 - DNA, 20 bp, Artificial Sequence
  Synthetic
tgaaatcgccaagaagcggt

SEQ ID NO: 42004 - DNA, 20 bp, Artificial Sequence
  Synthetic
tcctcccacctaccgcttct

SEQ ID NO: 42005 - DNA, 20 bp, Artificial Sequence
  Synthetic
tgagaatcagaagactcgct

SEQ ID NO: 42006 - DNA, 20 bp, Artificial Sequence
  Synthetic
gagaatcagaagactcgctt

SEQ ID NO: 42007 - DNA, 20 bp, Artificial Sequence
  Synthetic
gactcgcttgggcattcagt

SEQ ID NO: 42008 - DNA, 20 bp, Artificial Sequence
  Synthetic
ttttgaaaagaaccaactga

SEQ ID NO: 42009 - DNA, 20 bp, Artificial Sequence
  Synthetic
tgaaaagaaccaactgaagg

SEQ ID NO: 42010 - DNA, 20 bp, Artificial Sequence
  Synthetic
tatcttggtcctccttcagt

SEQ ID NO: 42011 - DNA, 20 bp, Artificial Sequence
  Synthetic
accaagataaagtacacatg

SEQ ID NO: 42012 - DNA, 20 bp, Artificial Sequence
  Synthetic
cccacatgtgtactttatct

SEQ ID NO: 42013 - DNA, 20 bp, Artificial Sequence
  Synthetic
ccaagataaagtacacatgt

SEQ ID NO: 42014 - DNA, 20 bp, Artificial Sequence
  Synthetic
tgagatagaaaagctcaaaa

SEQ ID NO: 42015 - DNA, 20 bp, Artificial Sequence
  Synthetic
tcatgtgtctttgttcctcc

SEQ ID NO: 42016 - DNA, 20 bp, Artificial Sequence
  Synthetic
gaagatcatagatgagacca

SEQ ID NO: 42017 - DNA, 20 bp, Artificial Sequence
  Synthetic
caggtcttgtagctgagcca

SEQ ID NO: 42018 - DNA, 20 bp, Artificial Sequence
  Synthetic
agacctgaagaatcagcatc

SEQ ID NO: 42019 - DNA, 20 bp, Artificial Sequence
  Synthetic
tggccagatgctgattcttc

SEQ ID NO: 42020 - DNA, 20 bp, Artificial Sequence
  Synthetic
tcagcatctggccaagaagt

SEQ ID NO: 42021 - DNA, 20 bp, Artificial Sequence
  Synthetic
gtcattcacttccgacttct

SEQ ID NO: 42022 - DNA, 20 bp, Artificial Sequence
  Synthetic
gaatgacaagaatcatgaga

SEQ ID NO: 42023 - DNA, 20 bp, Artificial Sequence
  Synthetic
tgacaagaatcatgagatgg

SEQ ID NO: 42024 - DNA, 20 bp, Artificial Sequence
  Synthetic
gaggagattcgtaagaaact

SEQ ID NO: 42025 - DNA, 20 bp, Artificial Sequence
  Synthetic
aggagattcgtaagaaactc

SEQ ID NO: 42026 - DNA, 20 bp, Artificial Sequence
  Synthetic
ggagattcgtaagaaactcg

SEQ ID NO: 42027 - DNA, 20 bp, Artificial Sequence
  Synthetic
gagattcgtaagaaactcgg

SEQ ID NO: 42028 - DNA, 20 bp, Artificial Sequence
  Synthetic
gcctgaacccactcacttgt

SEQ ID NO: 42029 - DNA, 20 bp, Artificial Sequence
  Synthetic
ggaaatgacccatttacaga

SEQ ID NO: 42030 - DNA, 20 bp, Artificial Sequence
  Synthetic
aatgacccatttacagaagg

SEQ ID NO: 42031 - DNA, 20 bp, Artificial Sequence
  Synthetic
tgtcacctccttctgtaaat

SEQ ID NO: 42032 - DNA, 20 bp, Artificial Sequence
  Synthetic
ctgtcacctccttctgtaaa

SEQ ID NO: 42033 - DNA, 20 bp, Artificial Sequence
  Synthetic
ctgttcaagcttggtctcaa

SEQ ID NO: 42034 - DNA, 20 bp, Artificial Sequence
  Synthetic
actgcgcttctgttcaagct

SEQ ID NO: 42035 - DNA, 20 bp, Artificial Sequence
  Synthetic
tgaccgtcacaacttgctac

SEQ ID NO: 42036 - DNA, 20 bp, Artificial Sequence
  Synthetic
aggcctgtagcaagttgtga

SEQ ID NO: 42037 - DNA, 20 bp, Artificial Sequence
  Synthetic
gctacaggcctgtaagatgc

SEQ ID NO: 42038 - DNA, 20 bp, Artificial Sequence
  Synthetic
cttaatgtcctgcatcttac

SEQ ID NO: 42039 - DNA, 20 bp, Artificial Sequence
  Synthetic
attaagttgccactgtcaaa

SEQ ID NO: 42040 - DNA, 20 bp, Artificial Sequence
  Synthetic
gccactgtcaaaaggcacca

SEQ ID NO: 42041 - DNA, 20 bp, Artificial Sequence
  Synthetic
tccatggtgccttttgacag

SEQ ID NO: 42042 - DNA, 20 bp, Artificial Sequence
  Synthetic
caccatggatgatattagtc

SEQ ID NO: 42043 - DNA, 20 bp, Artificial Sequence
  Synthetic
ttcctgactaatatcatcca

SEQ ID NO: 42044 - DNA, 20 bp, Artificial Sequence
  Synthetic
ggatgatattagtcaggaag

SEQ ID NO: 42045 - DNA, 20 bp, Artificial Sequence
  Synthetic
gccattgcagggtagctccc

SEQ ID NO: 42046 - DNA, 20 bp, Artificial Sequence
  Synthetic
ccattgcagggtagctccca

SEQ ID NO: 42047 - DNA, 20 bp, Artificial Sequence
  Synthetic
cattgcagggtagctcccag

SEQ ID NO: 42048 - DNA, 20 bp, Artificial Sequence
  Synthetic
attgcagggtagctcccagg

SEQ ID NO: 42049 - DNA, 20 bp, Artificial Sequence
  Synthetic
gcagggtagctcccaggggg

SEQ ID NO: 42050 - DNA, 20 bp, Artificial Sequence
  Synthetic
actcactgagtcctccccct

SEQ ID NO: 42051 - DNA, 20 bp, Artificial Sequence
  Synthetic
cactcactgagtcctccccc

SEQ ID NO: 42052 - DNA, 20 bp, Artificial Sequence
  Synthetic
cagggggaggactcagtgag

SEQ ID NO: 42053 - DNA, 20 bp, Artificial Sequence
  Synthetic
ttccagtatctatgcacgag

SEQ ID NO: 42054 - DNA, 20 bp, Artificial Sequence
  Synthetic
ggcctctcgtgcatagatac

SEQ ID NO: 42055 - DNA, 20 bp, Artificial Sequence
  Synthetic
gccctcattgagattgacta

SEQ ID NO: 42056 - DNA, 20 bp, Artificial Sequence
  Synthetic
accgtagtcaatctcaatga

SEQ ID NO: 42057 - DNA, 20 bp, Artificial Sequence
  Synthetic
caccgtagtcaatctcaatg

SEQ ID NO: 42058 - DNA, 20 bp, Artificial Sequence
  Synthetic
tgactacggtgatctgtgtg

SEQ ID NO: 42059 - DNA, 20 bp, Artificial Sequence
  Synthetic
tgatctgtgtgaggatctga

SEQ ID NO: 42060 - DNA, 20 bp, Artificial Sequence
  Synthetic
ctggggcttacaggatgccc

SEQ ID NO: 42061 - DNA, 20 bp, Artificial Sequence
  Synthetic
cttacaggatgcccaggctg

SEQ ID NO: 42062 - DNA, 20 bp, Artificial Sequence
  Synthetic
cttgatctcttcctcagcct

SEQ ID NO: 42063 - DNA, 20 bp, Artificial Sequence
  Synthetic
gcttgatctcttcctcagcc

SEQ ID NO: 42064 - DNA, 20 bp, Artificial Sequence
  Synthetic
tattgccgcccccaacatga

SEQ ID NO: 42065 - DNA, 20 bp, Artificial Sequence
  Synthetic
catggccttcatgttggggg

SEQ ID NO: 42066 - DNA, 20 bp, Artificial Sequence
  Synthetic
cgcccccaacatgaaggcca

SEQ ID NO: 42067 - DNA, 20 bp, Artificial Sequence
  Synthetic
ttccatggccttcatgttgg

SEQ ID NO: 42068 - DNA, 20 bp, Artificial Sequence
  Synthetic
tttccatggccttcatgttg

SEQ ID NO: 42069 - DNA, 20 bp, Artificial Sequence
  Synthetic
ttttccatggccttcatgtt

SEQ ID NO: 42070 - DNA, 20 bp, Artificial Sequence
  Synthetic
cttttccatggccttcatgt

SEQ ID NO: 42071 - DNA, 20 bp, Artificial Sequence
  Synthetic
catgaaggccatggaaaagc

SEQ ID NO: 42072 - DNA, 20 bp, Artificial Sequence
  Synthetic
gacactttccagcttttcca

SEQ ID NO: 42073 - DNA, 20 bp, Artificial Sequence
  Synthetic
aagtgtccgagacaagttcc

SEQ ID NO: 42074 - DNA, 20 bp, Artificial Sequence
  Synthetic
aggtctcctggaacttgtct

SEQ ID NO: 42075 - DNA, 20 bp, Artificial Sequence
  Synthetic
aagttccaggagacctcaga

SEQ ID NO: 42076 - DNA, 20 bp, Artificial Sequence
  Synthetic
tcttaccatctgaggtctcc

SEQ ID NO: 42077 - DNA, 20 bp, Artificial Sequence
  Synthetic
agggtaaatcttaccatctg

SEQ ID NO: 42078 - DNA, 20 bp, Artificial Sequence
  Synthetic
agcccgaaagcgagcaaaga

SEQ ID NO: 42079 - DNA, 20 bp, Artificial Sequence
  Synthetic
ggccttctttgctcgctttc

SEQ ID NO: 42080 - DNA, 20 bp, Artificial Sequence
  Synthetic
tggccttctttgctcgcttt

SEQ ID NO: 42081 - DNA, 20 bp, Artificial Sequence
  Synthetic
gcgagcaaagaaggccaagc

SEQ ID NO: 42082 - DNA, 20 bp, Artificial Sequence
  Synthetic
gatctgttcgaatgcctgct

SEQ ID NO: 42083 - DNA, 20 bp, Artificial Sequence
  Synthetic
ggcattcgaacagatcaaga

SEQ ID NO: 42084 - DNA, 20 bp, Artificial Sequence
  Synthetic
attcaaaacaagcattgaag

SEQ ID NO: 42085 - DNA, 20 bp, Artificial Sequence
  Synthetic
caatgcttgttttgaatctg

SEQ ID NO: 42086 - DNA, 20 bp, Artificial Sequence
  Synthetic
cttatagatctcatcaatgt

SEQ ID NO: 42087 - DNA, 20 bp, Artificial Sequence
  Synthetic
caacattgatgagatctata

SEQ ID NO: 42088 - DNA, 20 bp, Artificial Sequence
  Synthetic
ggcactgctattgcgggaca

SEQ ID NO: 42089 - DNA, 20 bp, Artificial Sequence
  Synthetic
gggcactgctattgcgggac

SEQ ID NO: 42090 - DNA, 20 bp, Artificial Sequence
  Synthetic
gtcccgcaatagcagtgccc

SEQ ID NO: 42091 - DNA, 20 bp, Artificial Sequence
  Synthetic
tacctgggcactgctattgc

SEQ ID NO: 42092 - DNA, 20 bp, Artificial Sequence
  Synthetic
ctacctgggcactgctattg

SEQ ID NO: 42093 - DNA, 20 bp, Artificial Sequence
  Synthetic
cgcaatagcagtgcccaggt

SEQ ID NO: 42094 - DNA, 20 bp, Artificial Sequence
  Synthetic
tgccttcccctaggcattcc

SEQ ID NO: 42095 - DNA, 20 bp, Artificial Sequence
  Synthetic
gccttcccctaggcattcct

SEQ ID NO: 42096 - DNA, 20 bp, Artificial Sequence
  Synthetic
cttcagggttctcagggccc

SEQ ID NO: 42097 - DNA, 20 bp, Artificial Sequence
  Synthetic
agggctcttcagggttctca

SEQ ID NO: 42098 - DNA, 20 bp, Artificial Sequence
  Synthetic
tagggctcttcagggttctc

SEQ ID NO: 42099 - DNA, 20 bp, Artificial Sequence
  Synthetic
gaaccctgaagagccctact

SEQ ID NO: 42100 - DNA, 20 bp, Artificial Sequence
  Synthetic
catccaagtagggctcttca

SEQ ID NO: 42101 - DNA, 20 bp, Artificial Sequence
  Synthetic
ccatccaagtagggctcttc

SEQ ID NO: 42102 - DNA, 20 bp, Artificial Sequence
  Synthetic
cctgaagagccctacttgga

SEQ ID NO: 42103 - DNA, 20 bp, Artificial Sequence
  Synthetic
tagttgatgccatccaagta

SEQ ID NO: 42104 - DNA, 20 bp, Artificial Sequence
  Synthetic
gtagttgatgccatccaagt

SEQ ID NO: 42105 - DNA, 20 bp, Artificial Sequence
  Synthetic
tggcatcaactacaactgtg

SEQ ID NO: 42106 - DNA, 20 bp, Artificial Sequence
  Synthetic
aactacaactgtgtggctcc

SEQ ID NO: 42107 - DNA, 20 bp, Artificial Sequence
  Synthetic
actacaactgtgtggctcct

SEQ ID NO: 42108 - DNA, 20 bp, Artificial Sequence
  Synthetic
tggctcctgggaaacgcttc

SEQ ID NO: 42109 - DNA, 20 bp, Artificial Sequence
  Synthetic
ataggccggaagcgtttccc

SEQ ID NO: 42110 - DNA, 20 bp, Artificial Sequence
  Synthetic
tgggaaacgcttccggccta

SEQ ID NO: 42111 - DNA, 20 bp, Artificial Sequence
  Synthetic
ctgacaagttgtccataggc

SEQ ID NO: 42112 - DNA, 20 bp, Artificial Sequence
  Synthetic
cggcctatggacaacttgtc

SEQ ID NO: 42113 - DNA, 20 bp, Artificial Sequence
  Synthetic
ccgcctgacaagttgtccat

SEQ ID NO: 42114 - DNA, 20 bp, Artificial Sequence
  Synthetic
cctatggacaacttgtcagg

SEQ ID NO: 42115 - DNA, 20 bp, Artificial Sequence
  Synthetic
ctatggacaacttgtcaggc

SEQ ID NO: 42116 - DNA, 20 bp, Artificial Sequence
  Synthetic
tatggacaacttgtcaggcg

SEQ ID NO: 42117 - DNA, 20 bp, Artificial Sequence
  Synthetic
gtcaggcggggagaagacag

SEQ ID NO: 42118 - DNA, 20 bp, Artificial Sequence
  Synthetic
ggagaagacagtggcagctc

SEQ ID NO: 42119 - DNA, 20 bp, Artificial Sequence
  Synthetic
cctgtggatggcaaagagca

SEQ ID NO: 42120 - DNA, 20 bp, Artificial Sequence
  Synthetic
ccctgctctttgccatccac

SEQ ID NO: 42121 - DNA, 20 bp, Artificial Sequence
  Synthetic
acctgtggatggcaaagagc

SEQ ID NO: 42122 - DNA, 20 bp, Artificial Sequence
  Synthetic
ggatcagccttacctgtgga

SEQ ID NO: 42123 - DNA, 20 bp, Artificial Sequence
  Synthetic
taggggatcagccttacctg

SEQ ID NO: 42124 - DNA, 20 bp, Artificial Sequence
  Synthetic
gaagggggctggcttgtagc

SEQ ID NO: 42125 - DNA, 20 bp, Artificial Sequence
  Synthetic
gccagcccccttcttcgtcc

SEQ ID NO: 42126 - DNA, 20 bp, Artificial Sequence
  Synthetic
tccaggacgaagaagggggc

SEQ ID NO: 42127 - DNA, 20 bp, Artificial Sequence
  Synthetic
ctcatccaggacgaagaagg

SEQ ID NO: 42128 - DNA, 20 bp, Artificial Sequence
  Synthetic
tctcatccaggacgaagaag

SEQ ID NO: 42129 - DNA, 20 bp, Artificial Sequence
  Synthetic
atctcatccaggacgaagaa

SEQ ID NO: 42130 - DNA, 20 bp, Artificial Sequence
  Synthetic
aatctcatccaggacgaaga

SEQ ID NO: 42131 - DNA, 20 bp, Artificial Sequence
  Synthetic
aggcagcatcaatctcatcc

SEQ ID NO: 42132 - DNA, 20 bp, Artificial Sequence
  Synthetic
ggatgagattgatgctgcct

SEQ ID NO: 42133 - DNA, 20 bp, Artificial Sequence
  Synthetic
gccttggataacaccaacat

SEQ ID NO: 42134 - DNA, 20 bp, Artificial Sequence
  Synthetic
gccaatgttggtgttatcca

SEQ ID NO: 42135 - DNA, 20 bp, Artificial Sequence
  Synthetic
ggataacaccaacattggca

SEQ ID NO: 42136 - DNA, 20 bp, Artificial Sequence
  Synthetic
taacaccaacattggcaagg

SEQ ID NO: 42137 - DNA, 20 bp, Artificial Sequence
  Synthetic
aacaccaacattggcaaggt

SEQ ID NO: 42138 - DNA, 20 bp, Artificial Sequence
  Synthetic
tgcacccaccttgccaatgt

SEQ ID NO: 42139 - DNA, 20 bp, Artificial Sequence
  Synthetic
acaggtggcaaattacatca

SEQ ID NO: 42140 - DNA, 20 bp, Artificial Sequence
  Synthetic
gcagtcgacttgcaacttcc

SEQ ID NO: 42141 - DNA, 20 bp, Artificial Sequence
  Synthetic
tgagagagatgacgatggcc

SEQ ID NO: 42142 - DNA, 20 bp, Artificial Sequence
  Synthetic
ggccatcgtcatctctctca

SEQ ID NO: 42143 - DNA, 20 bp, Artificial Sequence
  Synthetic
ctccttgagagagatgacga

SEQ ID NO: 42144 - DNA, 20 bp, Artificial Sequence
  Synthetic
catcgtcatctctctcaagg

SEQ ID NO: 42145 - DNA, 20 bp, Artificial Sequence
  Synthetic
caaggaggagttctacacca

SEQ ID NO: 42146 - DNA, 20 bp, Artificial Sequence
  Synthetic
accaaggccgagagcctcat

SEQ ID NO: 42147 - DNA, 20 bp, Artificial Sequence
  Synthetic
tccaatgaggctctcggcct

SEQ ID NO: 42148 - DNA, 20 bp, Artificial Sequence
  Synthetic
atagactccaatgaggctct

SEQ ID NO: 42149 - DNA, 20 bp, Artificial Sequence
  Synthetic
cctcaggatagactccaatg

SEQ ID NO: 42150 - DNA, 20 bp, Artificial Sequence
  Synthetic
cctcattggagtctatcctg

SEQ ID NO: 42151 - DNA, 20 bp, Artificial Sequence
  Synthetic
attggagtctatcctgaggt

SEQ ID NO: 42152 - DNA, 20 bp, Artificial Sequence
  Synthetic
agccaggcccgccctacctc

SEQ ID NO: 42153 - DNA, 20 bp, Artificial Sequence
  Synthetic
ctccctcctccttcagcaag

SEQ ID NO: 42154 - DNA, 20 bp, Artificial Sequence
  Synthetic
cacaagcagcagctccaggt

SEQ ID NO: 42155 - DNA, 20 bp, Artificial Sequence
  Synthetic
ccacaagcagcagctccagg

SEQ ID NO: 42156 - DNA, 20 bp, Artificial Sequence
  Synthetic
ccacctggagctgctgcttg

SEQ ID NO: 42157 - DNA, 20 bp, Artificial Sequence
  Synthetic
tttccacaagcagcagctcc

SEQ ID NO: 42158 - DNA, 20 bp, Artificial Sequence
  Synthetic
ttgtggaaaatttcaagtcg

SEQ ID NO: 42159 - DNA, 20 bp, Artificial Sequence
  Synthetic
tggaaaatttcaagtcgtgg

SEQ ID NO: 42160 - DNA, 20 bp, Artificial Sequence
  Synthetic
ggaaaatttcaagtcgtggc

SEQ ID NO: 42161 - DNA, 20 bp, Artificial Sequence
  Synthetic
gaaaatttcaagtcgtggcg

SEQ ID NO: 42162 - DNA, 20 bp, Artificial Sequence
  Synthetic
caagtcgtggcggggccgcc

SEQ ID NO: 42163 - DNA, 20 bp, Artificial Sequence
  Synthetic
tggcggggccgccaggtcat

SEQ ID NO: 42164 - DNA, 20 bp, Artificial Sequence
  Synthetic
ggaaggggccaatgacctgg

SEQ ID NO: 42165 - DNA, 20 bp, Artificial Sequence
  Synthetic
gccaggtcattggccccttc

SEQ ID NO: 42166 - DNA, 20 bp, Artificial Sequence
  Synthetic
tccggaaggggccaatgacc

SEQ ID NO: 42167 - DNA, 20 bp, Artificial Sequence
  Synthetic
aggtcattggccccttccgg

SEQ ID NO: 42168 - DNA, 20 bp, Artificial Sequence
  Synthetic
tgcaggtgaacctccggaag

SEQ ID NO: 42169 - DNA, 20 bp, Artificial Sequence
  Synthetic
atgcaggtgaacctccggaa

SEQ ID NO: 42170 - DNA, 20 bp, Artificial Sequence
  Synthetic
gatgcaggtgaacctccgga

SEQ ID NO: 42171 - DNA, 20 bp, Artificial Sequence
  Synthetic
cgatgatgcaggtgaacctc

SEQ ID NO: 42172 - DNA, 20 bp, Artificial Sequence
  Synthetic
cggaggttcacctgcatcat

SEQ ID NO: 42173 - DNA, 20 bp, Artificial Sequence
  Synthetic
acctgcatcatcggccccaa

SEQ ID NO: 42174 - DNA, 20 bp, Artificial Sequence
  Synthetic
gccgttggggccgatgatgc

SEQ ID NO: 42175 - DNA, 20 bp, Artificial Sequence
  Synthetic
atcatcggccccaacggctc

SEQ ID NO: 42176 - DNA, 20 bp, Artificial Sequence
  Synthetic
ctcagttaccagagccgttg

SEQ ID NO: 42177 - DNA, 20 bp, Artificial Sequence
  Synthetic
gctcagttaccagagccgtt

SEQ ID NO: 42178 - DNA, 20 bp, Artificial Sequence
  Synthetic
tgctcagttaccagagccgt

SEQ ID NO: 42179 - DNA, 20 bp, Artificial Sequence
  Synthetic
cccaggaaaatctaatgtaa

SEQ ID NO: 42180 - DNA, 20 bp, Artificial Sequence
  Synthetic
tccattacattagattttcc

SEQ ID NO: 42181 - DNA, 20 bp, Artificial Sequence
  Synthetic
ggatgcacttagttttgtaa

SEQ ID NO: 42182 - DNA, 20 bp, Artificial Sequence
  Synthetic
gatgcacttagttttgtaat

SEQ ID NO: 42183 - DNA, 20 bp, Artificial Sequence
  Synthetic
aatattcaagaactcattca

SEQ ID NO: 42184 - DNA, 20 bp, Artificial Sequence
  Synthetic
ctcattcatggagcacatat

SEQ ID NO: 42185 - DNA, 20 bp, Artificial Sequence
  Synthetic
acacttgcagaagaagaaat

SEQ ID NO: 42186 - DNA, 20 bp, Artificial Sequence
  Synthetic
aagtgtaaaaattatatatg

SEQ ID NO: 42187 - DNA, 20 bp, Artificial Sequence
  Synthetic
tgtaaaaattatatatgtgg

SEQ ID NO: 42188 - DNA, 20 bp, Artificial Sequence
  Synthetic
attatatatgtggaggaaag

SEQ ID NO: 42189 - DNA, 20 bp, Artificial Sequence
  Synthetic
gcgaagagaaaacatttgca

SEQ ID NO: 42190 - DNA, 20 bp, Artificial Sequence
  Synthetic
acatttgcaaggattatccg

SEQ ID NO: 42191 - DNA, 20 bp, Artificial Sequence
  Synthetic
ttctgtttacattgcagagt

SEQ ID NO: 42192 - DNA, 20 bp, Artificial Sequence
  Synthetic
attgcagagttggaaaagat

SEQ ID NO: 42193 - DNA, 20 bp, Artificial Sequence
  Synthetic
agtcaaagcacaaaattgtt

SEQ ID NO: 42194 - DNA, 20 bp, Artificial Sequence
  Synthetic
acaaaattgtttggtttttc

SEQ ID NO: 42195 - DNA, 20 bp, Artificial Sequence
  Synthetic
cagtgaagaaacccaaagaa

SEQ ID NO: 42196 - DNA, 20 bp, Artificial Sequence
  Synthetic
aaaaactgggtcctttcttt

SEQ ID NO: 42197 - DNA, 20 bp, Artificial Sequence
  Synthetic
aaaaaactgggtcctttctt

SEQ ID NO: 42198 - DNA, 20 bp, Artificial Sequence
  Synthetic
agaaaggacccagttttttg

SEQ ID NO: 42199 - DNA, 20 bp, Artificial Sequence
  Synthetic
gctgatttcctcaaaaaact

SEQ ID NO: 42200 - DNA, 20 bp, Artificial Sequence
  Synthetic
tgctgatttcctcaaaaaac

SEQ ID NO: 42201 - DNA, 20 bp, Artificial Sequence
  Synthetic
tttgaggaaatcagcacttc

SEQ ID NO: 42202 - DNA, 20 bp, Artificial Sequence
  Synthetic
agcacttcaggagagcttat

SEQ ID NO: 42203 - DNA, 20 bp, Artificial Sequence
  Synthetic
aaagttacaaaaagccgaag

SEQ ID NO: 42204 - DNA, 20 bp, Artificial Sequence
  Synthetic
gttaaactgtgcatcctctt

SEQ ID NO: 42205 - DNA, 20 bp, Artificial Sequence
  Synthetic
taataagaaaaaaaatatag

SEQ ID NO: 42206 - DNA, 20 bp, Artificial Sequence
  Synthetic
cagacaagcaaaattagaga

SEQ ID NO: 42207 - DNA, 20 bp, Artificial Sequence
  Synthetic
agcaaaattagagaaggaag

SEQ ID NO: 42208 - DNA, 20 bp, Artificial Sequence
  Synthetic
tcagttcttcaaggagactc

SEQ ID NO: 42209 - DNA, 20 bp, Artificial Sequence
  Synthetic
tgttcattttcagttcttca

SEQ ID NO: 42210 - DNA, 20 bp, Artificial Sequence
  Synthetic
gatgaatctttttctcatta

SEQ ID NO: 42211 - DNA, 20 bp, Artificial Sequence
  Synthetic
catgctctaacttggtgttc

SEQ ID NO: 42212 - DNA, 20 bp, Artificial Sequence
  Synthetic
cctattcacatgctctaact

SEQ ID NO: 42213 - DNA, 20 bp, Artificial Sequence
  Synthetic
ccaagttagagcatgtgaat

SEQ ID NO: 42214 - DNA, 20 bp, Artificial Sequence
  Synthetic
caagttagagcatgtgaata

SEQ ID NO: 42215 - DNA, 20 bp, Artificial Sequence
  Synthetic
atgaaaacatagttaaagcc

SEQ ID NO: 42216 - DNA, 20 bp, Artificial Sequence
  Synthetic
catagttaaagccaggaaaa

SEQ ID NO: 42217 - DNA, 20 bp, Artificial Sequence
  Synthetic
aaagccaggaaaaaggaaca

SEQ ID NO: 42218 - DNA, 20 bp, Artificial Sequence
  Synthetic
cattccatgttcctttttcc

SEQ ID NO: 42219 - DNA, 20 bp, Artificial Sequence
  Synthetic
aaacccttttaaatcagaag

SEQ ID NO: 42220 - DNA, 20 bp, Artificial Sequence
  Synthetic
aggcctcttctgatttaaaa

SEQ ID NO: 42221 - DNA, 20 bp, Artificial Sequence
  Synthetic
gaggcctcttctgatttaaa

SEQ ID NO: 42222 - DNA, 20 bp, Artificial Sequence
  Synthetic
tctttggctttaatgtactg

SEQ ID NO: 42223 - DNA, 20 bp, Artificial Sequence
  Synthetic
gtggtgagaagtgttttctt

SEQ ID NO: 42224 - DNA, 20 bp, Artificial Sequence
  Synthetic
ccacatctaatttcttaagg

SEQ ID NO: 42225 - DNA, 20 bp, Artificial Sequence
  Synthetic
ccaccttaagaaattagatg

SEQ ID NO: 42226 - DNA, 20 bp, Artificial Sequence
  Synthetic
tagccacatctaatttctta

SEQ ID NO: 42227 - DNA, 20 bp, Artificial Sequence
  Synthetic
tgtggctaagaaatcaataa

SEQ ID NO: 42228 - DNA, 20 bp, Artificial Sequence
  Synthetic
cgaaaaacaatgttctaaac

SEQ ID NO: 42229 - DNA, 20 bp, Artificial Sequence
  Synthetic
ggaagatgatataaaagccc

SEQ ID NO: 42230 - DNA, 20 bp, Artificial Sequence
  Synthetic
aaaagccctggagacagagc

SEQ ID NO: 42231 - DNA, 20 bp, Artificial Sequence
  Synthetic
atcagccagctctgtctcca

SEQ ID NO: 42232 - DNA, 20 bp, Artificial Sequence
  Synthetic
aatcagccagctctgtctcc

SEQ ID NO: 42233 - DNA, 20 bp, Artificial Sequence
  Synthetic
tggctgatttagatgctgca

SEQ ID NO: 42234 - DNA, 20 bp, Artificial Sequence
  Synthetic
aagttttgaaaagcagattg

SEQ ID NO: 42235 - DNA, 20 bp, Artificial Sequence
  Synthetic
taaaaagcgagacattgaac

SEQ ID NO: 42236 - DNA, 20 bp, Artificial Sequence
  Synthetic
cattgaactggaagccagtc

SEQ ID NO: 42237 - DNA, 20 bp, Artificial Sequence
  Synthetic
gttgtccttttttacctgac

SEQ ID NO: 42238 - DNA, 20 bp, Artificial Sequence
  Synthetic
ggatcgttataaagaactta

SEQ ID NO: 42239 - DNA, 20 bp, Artificial Sequence
  Synthetic
agctacaatgactcaacaac

SEQ ID NO: 42240 - DNA, 20 bp, Artificial Sequence
  Synthetic
aacaactggaaaaactgcag

SEQ ID NO: 42241 - DNA, 20 bp, Artificial Sequence
  Synthetic
acaactggaaaaactgcagt

SEQ ID NO: 42242 - DNA, 20 bp, Artificial Sequence
  Synthetic
gaagacagatgaagaaagac

SEQ ID NO: 42243 - DNA, 20 bp, Artificial Sequence
  Synthetic
aaagactggcatttgaaaag

SEQ ID NO: 42244 - DNA, 20 bp, Artificial Sequence
  Synthetic
gactggcatttgaaaagagg

SEQ ID NO: 42245 - DNA, 20 bp, Artificial Sequence
  Synthetic
gcatttgaaaagaggaggca

SEQ ID NO: 42246 - DNA, 20 bp, Artificial Sequence
  Synthetic
gaggaggcatggagaagttc

SEQ ID NO: 42247 - DNA, 20 bp, Artificial Sequence
  Synthetic
aaaacgaatagagaagttag

SEQ ID NO: 42248 - DNA, 20 bp, Artificial Sequence
  Synthetic
gtatacaaagacatgcatgt

SEQ ID NO: 42249 - DNA, 20 bp, Artificial Sequence
  Synthetic
gaaagagaaaaaacagcaag

SEQ ID NO: 42250 - DNA, 20 bp, Artificial Sequence
  Synthetic
acagcaagaggaaaccctag

SEQ ID NO: 42251 - DNA, 20 bp, Artificial Sequence
  Synthetic
tttttcaatttcatccacta

SEQ ID NO: 42252 - DNA, 20 bp, Artificial Sequence
  Synthetic
ttttttcaatttcatccact

SEQ ID NO: 42253 - DNA, 20 bp, Artificial Sequence
  Synthetic
agaagtgaattgcagaatgc

SEQ ID NO: 42254 - DNA, 20 bp, Artificial Sequence
  Synthetic
gaagtgaattgcagaatgct

SEQ ID NO: 42255 - DNA, 20 bp, Artificial Sequence
  Synthetic
tgctgggattgatacccatg

SEQ ID NO: 42256 - DNA, 20 bp, Artificial Sequence
  Synthetic
gctgggattgatacccatga

SEQ ID NO: 42257 - DNA, 20 bp, Artificial Sequence
  Synthetic
ttgctgacgttttccctcat

SEQ ID NO: 42258 - DNA, 20 bp, Artificial Sequence
  Synthetic
tttgctgacgttttccctca

SEQ ID NO: 42259 - DNA, 20 bp, Artificial Sequence
  Synthetic
acgtcagcaaaagagagcag

SEQ ID NO: 42260 - DNA, 20 bp, Artificial Sequence
  Synthetic
gcaaaagagagcagaggttc

SEQ ID NO: 42261 - DNA, 20 bp, Artificial Sequence
  Synthetic
aatctgggtacagtctttta

SEQ ID NO: 42262 - DNA, 20 bp, Artificial Sequence
  Synthetic
aagactgtacccagattctg

SEQ ID NO: 42263 - DNA, 20 bp, Artificial Sequence
  Synthetic
ttctcattaccacagaatct

SEQ ID NO: 42264 - DNA, 20 bp, Artificial Sequence
  Synthetic
attctcattaccacagaatc

SEQ ID NO: 42265 - DNA, 20 bp, Artificial Sequence
  Synthetic
tcttatgaataggatgacac

SEQ ID NO: 42266 - DNA, 20 bp, Artificial Sequence
  Synthetic
agctggtatttcttatgaat

SEQ ID NO: 42267 - DNA, 20 bp, Artificial Sequence
  Synthetic
tattcataagaaataccagc

SEQ ID NO: 42268 - DNA, 20 bp, Artificial Sequence
  Synthetic
ataccagctggctgttacta

SEQ ID NO: 42269 - DNA, 20 bp, Artificial Sequence
  Synthetic
aaaccttagtaacagccagc

SEQ ID NO: 42270 - DNA, 20 bp, Artificial Sequence
  Synthetic
ctggctgttactaaggtttt

SEQ ID NO: 42271 - DNA, 20 bp, Artificial Sequence
  Synthetic
ctgttactaaggtttttggc

SEQ ID NO: 42272 - DNA, 20 bp, Artificial Sequence
  Synthetic
caacaatggcagtgatgaac

SEQ ID NO: 42273 - DNA, 20 bp, Artificial Sequence
  Synthetic
cttttcagaggctacaacaa

SEQ ID NO: 42274 - DNA, 20 bp, Artificial Sequence
  Synthetic
cattgttgtagcctctgaaa

SEQ ID NO: 42275 - DNA, 20 bp, Artificial Sequence
  Synthetic
atcttttgctaccttttcag

SEQ ID NO: 42276 - DNA, 20 bp, Artificial Sequence
  Synthetic
agattgtattcgatttctga

SEQ ID NO: 42277 - DNA, 20 bp, Artificial Sequence
  Synthetic
ttgtattcgatttctgaagg

SEQ ID NO: 42278 - DNA, 20 bp, Artificial Sequence
  Synthetic
tctagagcgaggaatgtctc

SEQ ID NO: 42279 - DNA, 20 bp, Artificial Sequence
  Synthetic
catcaaggtaatctagagcg

SEQ ID NO: 42280 - DNA, 20 bp, Artificial Sequence
  Synthetic
attacaaagttcttacatca

SEQ ID NO: 42281 - DNA, 20 bp, Artificial Sequence
  Synthetic
agccaatcaatgaaagacta

SEQ ID NO: 42282 - DNA, 20 bp, Artificial Sequence
  Synthetic
gccaatcaatgaaagactaa

SEQ ID NO: 42283 - DNA, 20 bp, Artificial Sequence
  Synthetic
tcccttagtctttcattgat

SEQ ID NO: 42284 - DNA, 20 bp, Artificial Sequence
  Synthetic
gaaagactaagggagcttaa

SEQ ID NO: 42285 - DNA, 20 bp, Artificial Sequence
  Synthetic
ggagcttaaaggctgtaaaa

SEQ ID NO: 42286 - DNA, 20 bp, Artificial Sequence
  Synthetic
tgaatcactttcttcagctg

SEQ ID NO: 42287 - DNA, 20 bp, Artificial Sequence
  Synthetic
aaagtgattcagtttgtgtg

SEQ ID NO: 42288 - DNA, 20 bp, Artificial Sequence
  Synthetic
attcagtttgtgtgtggaaa

SEQ ID NO: 42289 - DNA, 20 bp, Artificial Sequence
  Synthetic
tggtcttgtttgtgagacta

SEQ ID NO: 42290 - DNA, 20 bp, Artificial Sequence
  Synthetic
gtgagactatggaagaagca

SEQ ID NO: 42291 - DNA, 20 bp, Artificial Sequence
  Synthetic
gcaaggcatattgcactcag

SEQ ID NO: 42292 - DNA, 20 bp, Artificial Sequence
  Synthetic
tttcttactttctgtctttc

SEQ ID NO: 42293 - DNA, 20 bp, Artificial Sequence
  Synthetic
ttacagacagtagctcttga

SEQ ID NO: 42294 - DNA, 20 bp, Artificial Sequence
  Synthetic
ggaacattatttttaaaatc

SEQ ID NO: 42295 - DNA, 20 bp, Artificial Sequence
  Synthetic
ttaaaatctggagtgatctc

SEQ ID NO: 42296 - DNA, 20 bp, Artificial Sequence
  Synthetic
aaatctggagtgatctctgg

SEQ ID NO: 42297 - DNA, 20 bp, Artificial Sequence
  Synthetic
aatctggagtgatctctgga

SEQ ID NO: 42298 - DNA, 20 bp, Artificial Sequence
  Synthetic
gtcaagtgacttaaaataca

SEQ ID NO: 42299 - DNA, 20 bp, Artificial Sequence
  Synthetic
taaaatacaaggctagatgc

SEQ ID NO: 42300 - DNA, 20 bp, Artificial Sequence
  Synthetic
aaaatacaaggctagatgct

SEQ ID NO: 42301 - DNA, 20 bp, Artificial Sequence
  Synthetic
cctttagctcttggattttc

SEQ ID NO: 42302 - DNA, 20 bp, Artificial Sequence
  Synthetic
ccagaaaatccaagagctaa

SEQ ID NO: 42303 - DNA, 20 bp, Artificial Sequence
  Synthetic
atggatttacctttagctct

SEQ ID NO: 42304 - DNA, 20 bp, Artificial Sequence
  Synthetic
gtttcaaatctgtttctttg

SEQ ID NO: 42305 - DNA, 20 bp, Artificial Sequence
  Synthetic
acaaatacagaccctgatac

SEQ ID NO: 42306 - DNA, 20 bp, Artificial Sequence
  Synthetic
caaatacagaccctgataca

SEQ ID NO: 42307 - DNA, 20 bp, Artificial Sequence
  Synthetic
tgtttgagttccctgtatca

SEQ ID NO: 42308 - DNA, 20 bp, Artificial Sequence
  Synthetic
gtgtttgagttccctgtatc

SEQ ID NO: 42309 - DNA, 20 bp, Artificial Sequence
  Synthetic
gcaccttgttgctttttacc

SEQ ID NO: 42310 - DNA, 20 bp, Artificial Sequence
  Synthetic
ttacctggtaaaaagcaaca

SEQ ID NO: 42311 - DNA, 20 bp, Artificial Sequence
  Synthetic
caatgtattatgttgagtga

SEQ ID NO: 42312 - DNA, 20 bp, Artificial Sequence
  Synthetic
tatgttgagtgaaggaatca

SEQ ID NO: 42313 - DNA, 20 bp, Artificial Sequence
  Synthetic
atttcaagaaaagatagata

SEQ ID NO: 42314 - DNA, 20 bp, Artificial Sequence
  Synthetic
caatttcttcacagaagtgt

SEQ ID NO: 42315 - DNA, 20 bp, Artificial Sequence
  Synthetic
caacacttctgtgaagaaat

SEQ ID NO: 42316 - DNA, 20 bp, Artificial Sequence
  Synthetic
cttctgtgaagaaattggcg

SEQ ID NO: 42317 - DNA, 20 bp, Artificial Sequence
  Synthetic
ttgagaacaaacatgttaaa

SEQ ID NO: 42318 - DNA, 20 bp, Artificial Sequence
  Synthetic
aacaagaaattgatcaaaaa

SEQ ID NO: 42319 - DNA, 20 bp, Artificial Sequence
  Synthetic
aatttgaaaaacaaaaaact

SEQ ID NO: 42320 - DNA, 20 bp, Artificial Sequence
  Synthetic
tcttattcagtttcttctta

SEQ ID NO: 42321 - DNA, 20 bp, Artificial Sequence
  Synthetic
ttaaaagaaactatccagaa

SEQ ID NO: 42322 - DNA, 20 bp, Artificial Sequence
  Synthetic
caatatcttcactacctttc

SEQ ID NO: 42323 - DNA, 20 bp, Artificial Sequence
  Synthetic
agatattgatcacctaaaga

SEQ ID NO: 42324 - DNA, 20 bp, Artificial Sequence
  Synthetic
cattattaattaccttcttt

SEQ ID NO: 42325 - DNA, 20 bp, Artificial Sequence
  Synthetic
gcagacagtgaatgaactca

SEQ ID NO: 42326 - DNA, 20 bp, Artificial Sequence
  Synthetic
ggcaaagcagcagcaactta

SEQ ID NO: 42327 - DNA, 20 bp, Artificial Sequence
  Synthetic
agtttgaactttctcggcac

SEQ ID NO: 42328 - DNA, 20 bp, Artificial Sequence
  Synthetic
aatttgagtttgaactttct

SEQ ID NO: 42329 - DNA, 20 bp, Artificial Sequence
  Synthetic
agttcaaactcaaattgaag

SEQ ID NO: 42330 - DNA, 20 bp, Artificial Sequence
  Synthetic
aaactcaaattgaagaggaa

SEQ ID NO: 42331 - DNA, 20 bp, Artificial Sequence
  Synthetic
agaggaacggaagaagtttc

SEQ ID NO: 42332 - DNA, 20 bp, Artificial Sequence
  Synthetic
agaagtttctggctgttgat

SEQ ID NO: 42333 - DNA, 20 bp, Artificial Sequence
  Synthetic
tctgtgtaattacagggaag

SEQ ID NO: 42334 - DNA, 20 bp, Artificial Sequence
  Synthetic
ctgtgtaattacagggaagt

SEQ ID NO: 42335 - DNA, 20 bp, Artificial Sequence
  Synthetic
tgtgtaattacagggaagtg

SEQ ID NO: 42336 - DNA, 20 bp, Artificial Sequence
  Synthetic
tgtaagtattcaaacttctc

SEQ ID NO: 42337 - DNA, 20 bp, Artificial Sequence
  Synthetic
cattgagataatccttttgt

SEQ ID NO: 42338 - DNA, 20 bp, Artificial Sequence
  Synthetic
attgagataatccttttgtc

SEQ ID NO: 42339 - DNA, 20 bp, Artificial Sequence
  Synthetic
ttgagataatccttttgtcg

SEQ ID NO: 42340 - DNA, 20 bp, Artificial Sequence
  Synthetic
aatccttttgtcggggtcac

SEQ ID NO: 42341 - DNA, 20 bp, Artificial Sequence
  Synthetic
catccagtgaccccgacaaa

SEQ ID NO: 42342 - DNA, 20 bp, Artificial Sequence
  Synthetic
actggatgacatcattgaag

SEQ ID NO: 42343 - DNA, 20 bp, Artificial Sequence
  Synthetic
ggatgacatcattgaagtgg

SEQ ID NO: 42344 - DNA, 20 bp, Artificial Sequence
  Synthetic
aactgaagcagaaagtaccc

SEQ ID NO: 42345 - DNA, 20 bp, Artificial Sequence
  Synthetic
atagatatcaattgttgcct

SEQ ID NO: 42346 - DNA, 20 bp, Artificial Sequence
  Synthetic
catagatatcaattgttgcc

SEQ ID NO: 42347 - DNA, 20 bp, Artificial Sequence
  Synthetic
agagctgtagtctatttcaa

SEQ ID NO: 42348 - DNA, 20 bp, Artificial Sequence
  Synthetic
agactacagctctctaaaag

SEQ ID NO: 42349 - DNA, 20 bp, Artificial Sequence
  Synthetic
ctctctaaaagaggatttga

SEQ ID NO: 42350 - DNA, 20 bp, Artificial Sequence
  Synthetic
acagtctgatcaagaaatcg

SEQ ID NO: 42351 - DNA, 20 bp, Artificial Sequence
  Synthetic
aagaaatcgaggcccacctt

SEQ ID NO: 42352 - DNA, 20 bp, Artificial Sequence
  Synthetic
ctgcaataagagcctaaggt

SEQ ID NO: 42353 - DNA, 20 bp, Artificial Sequence
  Synthetic
gctgcaataagagcctaagg

SEQ ID NO: 42354 - DNA, 20 bp, Artificial Sequence
  Synthetic
cttgctgcaataagagccta

SEQ ID NO: 42355 - DNA, 20 bp, Artificial Sequence
  Synthetic
attgcagcaagtagcatccc

SEQ ID NO: 42356 - DNA, 20 bp, Artificial Sequence
  Synthetic
tttcagtaagatatcttcct

SEQ ID NO: 42357 - DNA, 20 bp, Artificial Sequence
  Synthetic
ttttcagtaagatatcttcc

SEQ ID NO: 42358 - DNA, 20 bp, Artificial Sequence
  Synthetic
agccccaaacctacgagcac

SEQ ID NO: 42359 - DNA, 20 bp, Artificial Sequence
  Synthetic
ctccagtgctcgtaggtttg

SEQ ID NO: 42360 - DNA, 20 bp, Artificial Sequence
  Synthetic
tctccagtgctcgtaggttt

SEQ ID NO: 42361 - DNA, 20 bp, Artificial Sequence
  Synthetic
ttctccagtgctcgtaggtt

SEQ ID NO: 42362 - DNA, 20 bp, Artificial Sequence
  Synthetic
ttaagttctccagtgctcgt

SEQ ID NO: 42363 - DNA, 20 bp, Artificial Sequence
  Synthetic
aagtttcaagagtccacaga

SEQ ID NO: 42364 - DNA, 20 bp, Artificial Sequence
  Synthetic
acactcaattttaccatctg

SEQ ID NO: 42365 - DNA, 20 bp, Artificial Sequence
  Synthetic
tgattctctcttagcttttg

SEQ ID NO: 42366 - DNA, 20 bp, Artificial Sequence
  Synthetic
agcttttgaggccagcagaa

SEQ ID NO: 42367 - DNA, 20 bp, Artificial Sequence
  Synthetic
cagtctggcttcctttctgc

SEQ ID NO: 42368 - DNA, 20 bp, Artificial Sequence
  Synthetic
gaaaggaagccagactgtgt

SEQ ID NO: 42369 - DNA, 20 bp, Artificial Sequence
  Synthetic
gaactcttgcctacacagtc

SEQ ID NO: 42370 - DNA, 20 bp, Artificial Sequence
  Synthetic
agttcgagcaagtgaaaaaa

SEQ ID NO: 42371 - DNA, 20 bp, Artificial Sequence
  Synthetic
tgagacatgctcaaaacact

SEQ ID NO: 42372 - DNA, 20 bp, Artificial Sequence
  Synthetic
ttgagacatgctcaaaacac

SEQ ID NO: 42373 - DNA, 20 bp, Artificial Sequence
  Synthetic
aaggttcttcagggttctct

SEQ ID NO: 42374 - DNA, 20 bp, Artificial Sequence
  Synthetic
taaggttcttcagggttctc

SEQ ID NO: 42375 - DNA, 20 bp, Artificial Sequence
  Synthetic
gaaccctgaagaaccttact

SEQ ID NO: 42376 - DNA, 20 bp, Artificial Sequence
  Synthetic
cctccaagtaaggttcttca

SEQ ID NO: 42377 - DNA, 20 bp, Artificial Sequence
  Synthetic
ccctgaagaaccttacttgg

SEQ ID NO: 42378 - DNA, 20 bp, Artificial Sequence
  Synthetic
ccctccaagtaaggttcttc

SEQ ID NO: 42379 - DNA, 20 bp, Artificial Sequence
  Synthetic
cctgaagaaccttacttgga

SEQ ID NO: 42380 - DNA, 20 bp, Artificial Sequence
  Synthetic
tagctaattccctccaagta

SEQ ID NO: 42381 - DNA, 20 bp, Artificial Sequence
  Synthetic
gggaattagctataactgtg

SEQ ID NO: 42382 - DNA, 20 bp, Artificial Sequence
  Synthetic
agctataactgtgtggcccc

SEQ ID NO: 42383 - DNA, 20 bp, Artificial Sequence
  Synthetic
actgtgtggccccaggcaaa

SEQ ID NO: 42384 - DNA, 20 bp, Artificial Sequence
  Synthetic
tggcataaaccgtttgcctg

SEQ ID NO: 42385 - DNA, 20 bp, Artificial Sequence
  Synthetic
ttggcataaaccgtttgcct

SEQ ID NO: 42386 - DNA, 20 bp, Artificial Sequence
  Synthetic
attggcataaaccgtttgcc

SEQ ID NO: 42387 - DNA, 20 bp, Artificial Sequence
  Synthetic
aggcaaacggtttatgccaa

SEQ ID NO: 42388 - DNA, 20 bp, Artificial Sequence
  Synthetic
atgccaatggacaatttgtc

SEQ ID NO: 42389 - DNA, 20 bp, Artificial Sequence
  Synthetic
tgccaatggacaatttgtca

SEQ ID NO: 42390 - DNA, 20 bp, Artificial Sequence
  Synthetic
gccaatggacaatttgtcag

SEQ ID NO: 42391 - DNA, 20 bp, Artificial Sequence
  Synthetic
ccccctgacaaattgtccat

SEQ ID NO: 42392 - DNA, 20 bp, Artificial Sequence
  Synthetic
ccaatggacaatttgtcagg

SEQ ID NO: 42393 - DNA, 20 bp, Artificial Sequence
  Synthetic
gtcagggggagaaaagtgtg

SEQ ID NO: 42394 - DNA, 20 bp, Artificial Sequence
  Synthetic
agaaaagtgtgtggcagcct

SEQ ID NO: 42395 - DNA, 20 bp, Artificial Sequence
  Synthetic
cacagcaaacaggagagcca

SEQ ID NO: 42396 - DNA, 20 bp, Artificial Sequence
  Synthetic
ctctcctgtttgctgtgcac

SEQ ID NO: 42397 - DNA, 20 bp, Artificial Sequence
  Synthetic
cttacctgtgcacagcaaac

SEQ ID NO: 42398 - DNA, 20 bp, Artificial Sequence
  Synthetic
tctaaaacaaagaatggggc

SEQ ID NO: 42399 - DNA, 20 bp, Artificial Sequence
  Synthetic
ttcatctaaaacaaagaatg

SEQ ID NO: 42400 - DNA, 20 bp, Artificial Sequence
  Synthetic
cttcatctaaaacaaagaat

SEQ ID NO: 42401 - DNA, 20 bp, Artificial Sequence
  Synthetic
acttcatctaaaacaaagaa

SEQ ID NO: 42402 - DNA, 20 bp, Artificial Sequence
  Synthetic
attctttgttttagatgaag

SEQ ID NO: 42403 - DNA, 20 bp, Artificial Sequence
  Synthetic
gccctagacaatactaacat

SEQ ID NO: 42404 - DNA, 20 bp, Artificial Sequence
  Synthetic
gcctatgttagtattgtcta

SEQ ID NO: 42405 - DNA, 20 bp, Artificial Sequence
  Synthetic
tgcctatgttagtattgtct

SEQ ID NO: 42406 - DNA, 20 bp, Artificial Sequence
  Synthetic
ctttgatgtaacttgacacc

SEQ ID NO: 42407 - DNA, 20 bp, Artificial Sequence
  Synthetic
agatgactatcatctgaaac

SEQ ID NO: 42408 - DNA, 20 bp, Artificial Sequence
  Synthetic
ggaatagaactcttctttta

SEQ ID NO: 42409 - DNA, 20 bp, Artificial Sequence
  Synthetic
tggaatagaactcttctttt

SEQ ID NO: 42410 - DNA, 20 bp, Artificial Sequence
  Synthetic
tccagagccgacgcgctgat

SEQ ID NO: 42411 - DNA, 20 bp, Artificial Sequence
  Synthetic
gccgatcagcgcgtcggctc

SEQ ID NO: 42412 - DNA, 20 bp, Artificial Sequence
  Synthetic
atagatgccgatcagcgcgt

SEQ ID NO: 42413 - DNA, 20 bp, Artificial Sequence
  Synthetic
gctgatcggcatctatcctg

SEQ ID NO: 42414 - DNA, 20 bp, Artificial Sequence
  Synthetic
ctctgatttgtctttacctc

SEQ ID NO: 42415 - DNA, 20 bp, Artificial Sequence
  Synthetic
tattaagtcaattattctag

SEQ ID NO: 42416 - DNA, 20 bp, Artificial Sequence
  Synthetic
attaagtcaattattctaga

SEQ ID NO: 42417 - DNA, 20 bp, Artificial Sequence
  Synthetic
gattcaagtcctatgctcag

SEQ ID NO: 42418 - DNA, 20 bp, Artificial Sequence
  Synthetic
gacttcggtcctctgagcat

SEQ ID NO: 42419 - DNA, 20 bp, Artificial Sequence
  Synthetic
gctcagaggaccgaagtcaa

SEQ ID NO: 42420 - DNA, 20 bp, Artificial Sequence
  Synthetic
ggggtcaaaaccattgactt

SEQ ID NO: 42421 - DNA, 20 bp, Artificial Sequence
  Synthetic
cagtgatagcattgaagagg

SEQ ID NO: 42422 - DNA, 20 bp, Artificial Sequence
  Synthetic
ccagtgatagcattgaagag

SEQ ID NO: 42423 - DNA, 20 bp, Artificial Sequence
  Synthetic
cccctcttcaatgctatcac

SEQ ID NO: 42424 - DNA, 20 bp, Artificial Sequence
  Synthetic
gccagtgatagcattgaaga

SEQ ID NO: 42425 - DNA, 20 bp, Artificial Sequence
  Synthetic
agccagtgatagcattgaag

SEQ ID NO: 42426 - DNA, 20 bp, Artificial Sequence
  Synthetic
aatgctatcactggcttaaa

SEQ ID NO: 42427 - DNA, 20 bp, Artificial Sequence
  Synthetic
atcactggcttaaatggtag

SEQ ID NO: 42428 - DNA, 20 bp, Artificial Sequence
  Synthetic
tcactggcttaaatggtagt

SEQ ID NO: 42429 - DNA, 20 bp, Artificial Sequence
  Synthetic
tagtgggaaatccaacatat

SEQ ID NO: 42430 - DNA, 20 bp, Artificial Sequence
  Synthetic
gcagatggagtccaatatgt

SEQ ID NO: 42431 - DNA, 20 bp, Artificial Sequence
  Synthetic
ggactccatctgctttttgc

SEQ ID NO: 42432 - DNA, 20 bp, Artificial Sequence
  Synthetic
gactccatctgctttttgct

SEQ ID NO: 42433 - DNA, 20 bp, Artificial Sequence
  Synthetic
gatgcccagcaaaaagcaga

SEQ ID NO: 42434 - DNA, 20 bp, Artificial Sequence
  Synthetic
gggcatctccaacctgtctc

SEQ ID NO: 42435 - DNA, 20 bp, Artificial Sequence
  Synthetic
acactttacctgagacaggt

SEQ ID NO: 42436 - DNA, 20 bp, Artificial Sequence
  Synthetic
gtttacactttacctgagac

SEQ ID NO: 42437 - DNA, 20 bp, Artificial Sequence
  Synthetic
tcatattttattttaggttc

SEQ ID NO: 42438 - DNA, 20 bp, Artificial Sequence
  Synthetic
caagatttagtttacaaaaa

SEQ ID NO: 42439 - DNA, 20 bp, Artificial Sequence
  Synthetic
aagatttagtttacaaaaat

SEQ ID NO: 42440 - DNA, 20 bp, Artificial Sequence
  Synthetic
tttagtttacaaaaatgggc

SEQ ID NO: 42441 - DNA, 20 bp, Artificial Sequence
  Synthetic
gtttacaaaaatgggcaggc

SEQ ID NO: 42442 - DNA, 20 bp, Artificial Sequence
  Synthetic
agtgattgacacagaggctt

SEQ ID NO: 42443 - DNA, 20 bp, Artificial Sequence
  Synthetic
atcaaaagtgattgacacag

SEQ ID NO: 42444 - DNA, 20 bp, Artificial Sequence
  Synthetic
gacaaaaagcaaagtccttt

SEQ ID NO: 42445 - DNA, 20 bp, Artificial Sequence
  Synthetic
gcaaagtcctttaggatttg

SEQ ID NO: 42446 - DNA, 20 bp, Artificial Sequence
  Synthetic
tcatgaacctcaaatcctaa

SEQ ID NO: 42447 - DNA, 20 bp, Artificial Sequence
  Synthetic
atgatgaaatcacagtaaca

SEQ ID NO: 42448 - DNA, 20 bp, Artificial Sequence
  Synthetic
tgaaatcacagtaacaaggc

SEQ ID NO: 42449 - DNA, 20 bp, Artificial Sequence
  Synthetic
tttcttttataggtggttat

SEQ ID NO: 42450 - DNA, 20 bp, Artificial Sequence
  Synthetic
cttttataggtggttattgg

SEQ ID NO: 42451 - DNA, 20 bp, Artificial Sequence
  Synthetic
agaaataaatatttaatcaa

SEQ ID NO: 42452 - DNA, 20 bp, Artificial Sequence
  Synthetic
tgccaacaacaccagagtac

SEQ ID NO: 42453 - DNA, 20 bp, Artificial Sequence
  Synthetic
atcctgtactctggtgttgt

SEQ ID NO: 42454 - DNA, 20 bp, Artificial Sequence
  Synthetic
acagaagagatcctgtactc

SEQ ID NO: 42455 - DNA, 20 bp, Artificial Sequence
  Synthetic
caggatctcttctgttctgt

SEQ ID NO: 42456 - DNA, 20 bp, Artificial Sequence
  Synthetic
agtgagggttgttaacatta

SEQ ID NO: 42457 - DNA, 20 bp, Artificial Sequence
  Synthetic
cctgcatgatgagaaagtga

SEQ ID NO: 42458 - DNA, 20 bp, Artificial Sequence
  Synthetic
ccctcactttctcatcatgc

SEQ ID NO: 42459 - DNA, 20 bp, Artificial Sequence
  Synthetic
acctgcatgatgagaaagtg

SEQ ID NO: 42460 - DNA, 20 bp, Artificial Sequence
  Synthetic
tattcaatacttttgtaatt

SEQ ID NO: 42461 - DNA, 20 bp, Artificial Sequence
  Synthetic
attgaatatgaaacctccag

SEQ ID NO: 42462 - DNA, 20 bp, Artificial Sequence
  Synthetic
aatagtactcttacctctgg

SEQ ID NO: 42463 - DNA, 20 bp, Artificial Sequence
  Synthetic
ataaatagtactcttacctc

SEQ ID NO: 42464 - DNA, 20 bp, Artificial Sequence
  Synthetic
cttctatcatggataaaatc

SEQ ID NO: 42465 - DNA, 20 bp, Artificial Sequence
  Synthetic
tccatgatagaagaagcagc

SEQ ID NO: 42466 - DNA, 20 bp, Artificial Sequence
  Synthetic
tccagctgcttcttctatca

SEQ ID NO: 42467 - DNA, 20 bp, Artificial Sequence
  Synthetic
tagaagaagcagctggaacc

SEQ ID NO: 42468 - DNA, 20 bp, Artificial Sequence
  Synthetic
ttttttgtattcatacatcc

SEQ ID NO: 42469 - DNA, 20 bp, Artificial Sequence
  Synthetic
acagaaaactatagaaaaaa

SEQ ID NO: 42470 - DNA, 20 bp, Artificial Sequence
  Synthetic
gaaaactatagaaaaaaagg

SEQ ID NO: 42471 - DNA, 20 bp, Artificial Sequence
  Synthetic
taagctgaaagaaattaaga

SEQ ID NO: 42472 - DNA, 20 bp, Artificial Sequence
  Synthetic
taatctcttcttcaagtatc

SEQ ID NO: 42473 - DNA, 20 bp, Artificial Sequence
  Synthetic
tcttttaatttttgaatggt

SEQ ID NO: 42474 - DNA, 20 bp, Artificial Sequence
  Synthetic
aaccattcaaaaattaaaag

SEQ ID NO: 42475 - DNA, 20 bp, Artificial Sequence
  Synthetic
tacctcttttaatttttgaa

SEQ ID NO: 42476 - DNA, 20 bp, Artificial Sequence
  Synthetic
tcaggaaagatcgtcctact

SEQ ID NO: 42477 - DNA, 20 bp, Artificial Sequence
  Synthetic
tactttttggtactccaagt

SEQ ID NO: 42478 - DNA, 20 bp, Artificial Sequence
  Synthetic
ctatttctctcattactttt

SEQ ID NO: 42479 - DNA, 20 bp, Artificial Sequence
  Synthetic
tattgcttatcagtttttgc

SEQ ID NO: 42480 - DNA, 20 bp, Artificial Sequence
  Synthetic
taccaaagtacgctcagctg

SEQ ID NO: 42481 - DNA, 20 bp, Artificial Sequence
  Synthetic
ttcctcagctgagcgtactt

SEQ ID NO: 42482 - DNA, 20 bp, Artificial Sequence
  Synthetic
agataaagttataaagcttc

SEQ ID NO: 42483 - DNA, 20 bp, Artificial Sequence
  Synthetic
taatcatgaaatagaagaat

SEQ ID NO: 42484 - DNA, 20 bp, Artificial Sequence
  Synthetic
attggaaaaaagaaaagata

SEQ ID NO: 42485 - DNA, 20 bp, Artificial Sequence
  Synthetic
tgcattttgttataggaaac

SEQ ID NO: 42486 - DNA, 20 bp, Artificial Sequence
  Synthetic
attttgttataggaaactgg

SEQ ID NO: 42487 - DNA, 20 bp, Artificial Sequence
  Synthetic
tttagaagatgctcttgcag

SEQ ID NO: 42488 - DNA, 20 bp, Artificial Sequence
  Synthetic
tgatctcaagaagaaaaatc

SEQ ID NO: 42489 - DNA, 20 bp, Artificial Sequence
  Synthetic
gaagaaaaatctggcatgtg

SEQ ID NO: 42490 - DNA, 20 bp, Artificial Sequence
  Synthetic
ggaaagcaaacgcaaagagc

SEQ ID NO: 42491 - DNA, 20 bp, Artificial Sequence
  Synthetic
caaagagctggaaaaaaata

SEQ ID NO: 42492 - DNA, 20 bp, Artificial Sequence
  Synthetic
gctggaaaaaaatatggttg

SEQ ID NO: 42493 - DNA, 20 bp, Artificial Sequence
  Synthetic
ctcaaaaactttagcagcaa

SEQ ID NO: 42494 - DNA, 20 bp, Artificial Sequence
  Synthetic
tttagcagcaaaggaaaaag

SEQ ID NO: 42495 - DNA, 20 bp, Artificial Sequence
  Synthetic
gaggttaaaaagataacaga

SEQ ID NO: 42496 - DNA, 20 bp, Artificial Sequence
  Synthetic
tttattacttgcttcttgaa

SEQ ID NO: 42497 - DNA, 20 bp, Artificial Sequence
  Synthetic
ctttattacttgcttcttga

SEQ ID NO: 42498 - DNA, 20 bp, Artificial Sequence
  Synthetic
taataaagatgctgaagctc

SEQ ID NO: 42499 - DNA, 20 bp, Artificial Sequence
  Synthetic
cacttcaatgctgtttccgc

SEQ ID NO: 42500 - DNA, 20 bp, Artificial Sequence
  Synthetic
ttcattactggacaggccag

SEQ ID NO: 42501 - DNA, 20 bp, Artificial Sequence
  Synthetic
ggcctgtccagtaatgaaga

SEQ ID NO: 42502 - DNA, 20 bp, Artificial Sequence
  Synthetic
ctccatcttcattactggac

SEQ ID NO: 42503 - DNA, 20 bp, Artificial Sequence
  Synthetic
ttctgctccatcttcattac

SEQ ID NO: 42504 - DNA, 20 bp, Artificial Sequence
  Synthetic
ggagcagaagcaactcttgc

SEQ ID NO: 42505 - DNA, 20 bp, Artificial Sequence
  Synthetic
aactcttgctggtcaaatga

SEQ ID NO: 42506 - DNA, 20 bp, Artificial Sequence
  Synthetic
tttacttatatcatttttac

SEQ ID NO: 42507 - DNA, 20 bp, Artificial Sequence
  Synthetic
agctcagacagaagccaaac

SEQ ID NO: 42508 - DNA, 20 bp, Artificial Sequence
  Synthetic
aatgtctctatttacctgtt

SEQ ID NO: 42509 - DNA, 20 bp, Artificial Sequence
  Synthetic
gaagttgaagcatgctcaac

SEQ ID NO: 42510 - DNA, 20 bp, Artificial Sequence
  Synthetic
acaagctgaagttaagaaga

SEQ ID NO: 42511 - DNA, 20 bp, Artificial Sequence
  Synthetic
gaagttaagaagatggatag

SEQ ID NO: 42512 - DNA, 20 bp, Artificial Sequence
  Synthetic
agaagatggatagtggctac

SEQ ID NO: 42513 - DNA, 20 bp, Artificial Sequence
  Synthetic
gatggatagtggctacagga

SEQ ID NO: 42514 - DNA, 20 bp, Artificial Sequence
  Synthetic
atgaaaaagctaaattatga

SEQ ID NO: 42515 - DNA, 20 bp, Artificial Sequence
  Synthetic
ttatccttcagaaaataaag

SEQ ID NO: 42516 - DNA, 20 bp, Artificial Sequence
  Synthetic
aaataaagaggaaagccttt

SEQ ID NO: 42517 - DNA, 20 bp, Artificial Sequence
  Synthetic
aaagccttttggaaaagcgc

SEQ ID NO: 42518 - DNA, 20 bp, Artificial Sequence
  Synthetic
gctgcctgcgcttttccaaa

SEQ ID NO: 42519 - DNA, 20 bp, Artificial Sequence
  Synthetic
aggcagctgtctcgtgatat

SEQ ID NO: 42520 - DNA, 20 bp, Artificial Sequence
  Synthetic
aaatcgaagattgggaaatc

SEQ ID NO: 42521 - DNA, 20 bp, Artificial Sequence
  Synthetic
ttgtatgcaaatcgaagatt

SEQ ID NO: 42522 - DNA, 20 bp, Artificial Sequence
  Synthetic
cttgtatgcaaatcgaagat

SEQ ID NO: 42523 - DNA, 20 bp, Artificial Sequence
  Synthetic
tcagggatccagagaagaac

SEQ ID NO: 42524 - DNA, 20 bp, Artificial Sequence
  Synthetic
tttctattccagttcttctc

SEQ ID NO: 42525 - DNA, 20 bp, Artificial Sequence
  Synthetic
tggaatagaaattgtgtgaa

SEQ ID NO: 42526 - DNA, 20 bp, Artificial Sequence
  Synthetic
aaattgtgtgaaaggacttg

SEQ ID NO: 42527 - DNA, 20 bp, Artificial Sequence
  Synthetic
aaccacagctttagaattag

SEQ ID NO: 42528 - DNA, 20 bp, Artificial Sequence
  Synthetic
agccactaattctaaagctg

SEQ ID NO: 42529 - DNA, 20 bp, Artificial Sequence
  Synthetic
acagctttagaattagtggc

SEQ ID NO: 42530 - DNA, 20 bp, Artificial Sequence
  Synthetic
aaatgtgtgttgtaggttac

SEQ ID NO: 42531 - DNA, 20 bp, Artificial Sequence
  Synthetic
ctggtaaaaagctactagaa

SEQ ID NO: 42532 - DNA, 20 bp, Artificial Sequence
  Synthetic
tggtaaaaagctactagaaa

SEQ ID NO: 42533 - DNA, 20 bp, Artificial Sequence
  Synthetic
ggtaaaaagctactagaaag

SEQ ID NO: 42534 - DNA, 20 bp, Artificial Sequence
  Synthetic
gtaaaaagctactagaaagg

SEQ ID NO: 42535 - DNA, 20 bp, Artificial Sequence
  Synthetic
taaaaagctactagaaaggg

SEQ ID NO: 42536 - DNA, 20 bp, Artificial Sequence
  Synthetic
ctggctgaaattttattgag

SEQ ID NO: 42537 - DNA, 20 bp, Artificial Sequence
  Synthetic
agtttctggtgcaatacatc

SEQ ID NO: 42538 - DNA, 20 bp, Artificial Sequence
  Synthetic
tgagcaactctcagagtttc

SEQ ID NO: 42539 - DNA, 20 bp, Artificial Sequence
  Synthetic
tggccctgacaacgttcatg

SEQ ID NO: 42540 - DNA, 20 bp, Artificial Sequence
  Synthetic
gagccacatgaacgttgtca

SEQ ID NO: 42541 - DNA, 20 bp, Artificial Sequence
  Synthetic
agagccacatgaacgttgtc

SEQ ID NO: 42542 - DNA, 20 bp, Artificial Sequence
  Synthetic
cgttcatgtggctctttcct

SEQ ID NO: 42543 - DNA, 20 bp, Artificial Sequence
  Synthetic
ttctggtttatattcaacca

SEQ ID NO: 42544 - DNA, 20 bp, Artificial Sequence
  Synthetic
accagaacttcagaaagcaa

SEQ ID NO: 42545 - DNA, 20 bp, Artificial Sequence
  Synthetic
tccattgctttctgaagttc

SEQ ID NO: 42546 - DNA, 20 bp, Artificial Sequence
  Synthetic
aaagcaatggagtttgtctt

SEQ ID NO: 42547 - DNA, 20 bp, Artificial Sequence
  Synthetic
aacatttgtttgtgacaata

SEQ ID NO: 42548 - DNA, 20 bp, Artificial Sequence
  Synthetic
tatggataatgccaaaaaag

SEQ ID NO: 42549 - DNA, 20 bp, Artificial Sequence
  Synthetic
cttatcaaaggccacttttt

SEQ ID NO: 42550 - DNA, 20 bp, Artificial Sequence
  Synthetic
aaaaagtggcctttgataag

SEQ ID NO: 42551 - DNA, 20 bp, Artificial Sequence
  Synthetic
agtcattatcctcttatcaa

SEQ ID NO: 42552 - DNA, 20 bp, Artificial Sequence
  Synthetic
atgactagaactgtaactct

SEQ ID NO: 42553 - DNA, 20 bp, Artificial Sequence
  Synthetic
actagaactgtaactctcgg

SEQ ID NO: 42554 - DNA, 20 bp, Artificial Sequence
  Synthetic
ggtgatgtgtttgatcctca

SEQ ID NO: 42555 - DNA, 20 bp, Artificial Sequence
  Synthetic
gtgatgtgtttgatcctcat

SEQ ID NO: 42556 - DNA, 20 bp, Artificial Sequence
  Synthetic
gatcctcatgggacattgag

SEQ ID NO: 42557 - DNA, 20 bp, Artificial Sequence
  Synthetic
cctccactcaatgtcccatg

SEQ ID NO: 42558 - DNA, 20 bp, Artificial Sequence
  Synthetic
cctcatgggacattgagtgg

SEQ ID NO: 42559 - DNA, 20 bp, Artificial Sequence
  Synthetic
tctatcaggtgctcgatccc

SEQ ID NO: 42560 - DNA, 20 bp, Artificial Sequence
  Synthetic
ggttaaaatggaagctgcct

SEQ ID NO: 42561 - DNA, 20 bp, Artificial Sequence
  Synthetic
tggttaaaatggaagctgcc

SEQ ID NO: 42562 - DNA, 20 bp, Artificial Sequence
  Synthetic
agctgaggtggctaaaaata

SEQ ID NO: 42563 - DNA, 20 bp, Artificial Sequence
  Synthetic
gaggtggctaaaaataaggt

SEQ ID NO: 42564 - DNA, 20 bp, Artificial Sequence
  Synthetic
agtaaataaagctcaagaag

SEQ ID NO: 42565 - DNA, 20 bp, Artificial Sequence
  Synthetic
agaggtgaccaagcaaaaag

SEQ ID NO: 42566 - DNA, 20 bp, Artificial Sequence
  Synthetic
tgttatcacctctttttgct

SEQ ID NO: 42567 - DNA, 20 bp, Artificial Sequence
  Synthetic
agctttaattacagtgtctt

SEQ ID NO: 42568 - DNA, 20 bp, Artificial Sequence
  Synthetic
tagctttaattacagtgtct

SEQ ID NO: 42569 - DNA, 20 bp, Artificial Sequence
  Synthetic
taaagctaaatatgcagaag

SEQ ID NO: 42570 - DNA, 20 bp, Artificial Sequence
  Synthetic
tgcagaagtggcaaaacaca

SEQ ID NO: 42571 - DNA, 20 bp, Artificial Sequence
  Synthetic
tgattctcagcttaaaatta

SEQ ID NO: 42572 - DNA, 20 bp, Artificial Sequence
  Synthetic
gtttatgtttgctgatgttg

SEQ ID NO: 42573 - DNA, 20 bp, Artificial Sequence
  Synthetic
acaacatcagcaaacataaa

SEQ ID NO: 42574 - DNA, 20 bp, Artificial Sequence
  Synthetic
caacatcagcaaacataaac

SEQ ID NO: 42575 - DNA, 20 bp, Artificial Sequence
  Synthetic
catcagcaaacataaacggg

SEQ ID NO: 42576 - DNA, 20 bp, Artificial Sequence
  Synthetic
cataaacgggaggctgaaga

SEQ ID NO: 42577 - DNA, 20 bp, Artificial Sequence
  Synthetic
ggctgaagatggtgctgcaa

SEQ ID NO: 42578 - DNA, 20 bp, Artificial Sequence
  Synthetic
gtcataatctttcaacattt

SEQ ID NO: 42579 - DNA, 20 bp, Artificial Sequence
  Synthetic
aaatgttgaaagattatgac

SEQ ID NO: 42580 - DNA, 20 bp, Artificial Sequence
  Synthetic
aatgcagagagacacctctt

SEQ ID NO: 42581 - DNA, 20 bp, Artificial Sequence
  Synthetic
cactattgggttggccaaag

SEQ ID NO: 42582 - DNA, 20 bp, Artificial Sequence
  Synthetic
aatcataggcactattgggt

SEQ ID NO: 42583 - DNA, 20 bp, Artificial Sequence
  Synthetic
ttgaaatcataggcactatt

SEQ ID NO: 42584 - DNA, 20 bp, Artificial Sequence
  Synthetic
tttgaaatcataggcactat

SEQ ID NO: 42585 - DNA, 20 bp, Artificial Sequence
  Synthetic
gttgttagttttgaaatcat

SEQ ID NO: 42586 - DNA, 20 bp, Artificial Sequence
  Synthetic
actaacaaccctaaagaagc

SEQ ID NO: 42587 - DNA, 20 bp, Artificial Sequence
  Synthetic
gtctctgaccagcttcttta

SEQ ID NO: 42588 - DNA, 20 bp, Artificial Sequence
  Synthetic
agtctctgaccagcttcttt

SEQ ID NO: 42589 - DNA, 20 bp, Artificial Sequence
  Synthetic
tcagaagttgcaagaaatga

SEQ ID NO: 42590 - DNA, 20 bp, Artificial Sequence
  Synthetic
caagaaatgaaggagaaact

SEQ ID NO: 42591 - DNA, 20 bp, Artificial Sequence
  Synthetic
ttctatagttgtaagaattt

SEQ ID NO: 42592 - DNA, 20 bp, Artificial Sequence
  Synthetic
cttggtttttcttctggtca

SEQ ID NO: 42593 - DNA, 20 bp, Artificial Sequence
  Synthetic
ttagggcttggtttttcttc

SEQ ID NO: 42594 - DNA, 20 bp, Artificial Sequence
  Synthetic
accaagccctaaatattgca

SEQ ID NO: 42595 - DNA, 20 bp, Artificial Sequence
  Synthetic
gccatgcaatatttagggct

SEQ ID NO: 42596 - DNA, 20 bp, Artificial Sequence
  Synthetic
cttttgccatgcaatattta

SEQ ID NO: 42597 - DNA, 20 bp, Artificial Sequence
  Synthetic
ccttttgccatgcaatattt

SEQ ID NO: 42598 - DNA, 20 bp, Artificial Sequence
  Synthetic
cctaaatattgcatggcaaa

SEQ ID NO: 42599 - DNA, 20 bp, Artificial Sequence
  Synthetic
tttttaaatccaggtgaaca

SEQ ID NO: 42600 - DNA, 20 bp, Artificial Sequence
  Synthetic
atccaggtgaacaaggactt

SEQ ID NO: 42601 - DNA, 20 bp, Artificial Sequence
  Synthetic
tccaggtgaacaaggacttt

SEQ ID NO: 42602 - DNA, 20 bp, Artificial Sequence
  Synthetic
acccaaagtccttgttcacc

SEQ ID NO: 42603 - DNA, 20 bp, Artificial Sequence
  Synthetic
attttttctactcttttgcc

SEQ ID NO: 42604 - DNA, 20 bp, Artificial Sequence
  Synthetic
gcaagcatagcattagcacc

SEQ ID NO: 42605 - DNA, 20 bp, Artificial Sequence
  Synthetic
tgctatgcttgcaccaccag

SEQ ID NO: 42606 - DNA, 20 bp, Artificial Sequence
  Synthetic
gctatgcttgcaccaccaga

SEQ ID NO: 42607 - DNA, 20 bp, Artificial Sequence
  Synthetic
aaaacagtttgaccctctgg

SEQ ID NO: 42608 - DNA, 20 bp, Artificial Sequence
  Synthetic
accagagggtcaaactgttt

SEQ ID NO: 42609 - DNA, 20 bp, Artificial Sequence
  Synthetic
tccaaaacagtttgaccctc

SEQ ID NO: 42610 - DNA, 20 bp, Artificial Sequence
  Synthetic
gagggtcaaactgttttgga

SEQ ID NO: 42611 - DNA, 20 bp, Artificial Sequence
  Synthetic
tcaaactgttttggatggtc

SEQ ID NO: 42612 - DNA, 20 bp, Artificial Sequence
  Synthetic
tttggatggtctggagttca

SEQ ID NO: 42613 - DNA, 20 bp, Artificial Sequence
  Synthetic
tctggagttcaaggttgcct

SEQ ID NO: 42614 - DNA, 20 bp, Artificial Sequence
  Synthetic
ctggagttcaaggttgcctt

SEQ ID NO: 42615 - DNA, 20 bp, Artificial Sequence
  Synthetic
aggttgccttgggaaatacc

SEQ ID NO: 42616 - DNA, 20 bp, Artificial Sequence
  Synthetic
ttctttccaggtatttccca

SEQ ID NO: 42617 - DNA, 20 bp, Artificial Sequence
  Synthetic
ttcagttaggttttctttcc

SEQ ID NO: 42618 - DNA, 20 bp, Artificial Sequence
  Synthetic
gaaaacctaactgaacttag

SEQ ID NO: 42619 - DNA, 20 bp, Artificial Sequence
  Synthetic
aacctaactgaacttagtgg

SEQ ID NO: 42620 - DNA, 20 bp, Artificial Sequence
  Synthetic
gaccaccactaagttcagtt

SEQ ID NO: 42621 - DNA, 20 bp, Artificial Sequence
  Synthetic
ctgaacttagtggtggtcag

SEQ ID NO: 42622 - DNA, 20 bp, Artificial Sequence
  Synthetic
accttttcttaggtctttag

SEQ ID NO: 42623 - DNA, 20 bp, Artificial Sequence
  Synthetic
catggacagtattaatgaca

SEQ ID NO: 42624 - DNA, 20 bp, Artificial Sequence
  Synthetic
agcaggtttgaagagaagca

SEQ ID NO: 42625 - DNA, 20 bp, Artificial Sequence
  Synthetic
tcaaggatataaattggagc

SEQ ID NO: 42626 - DNA, 20 bp, Artificial Sequence
  Synthetic
tccaatttatatccttgatg

SEQ ID NO: 42627 - DNA, 20 bp, Artificial Sequence
  Synthetic
acctcatcaaggatataaat

SEQ ID NO: 42628 - DNA, 20 bp, Artificial Sequence
  Synthetic
aggctgcatctacctcatca

SEQ ID NO: 42629 - DNA, 20 bp, Artificial Sequence
  Synthetic
tgatgaggtagatgcagcct

SEQ ID NO: 42630 - DNA, 20 bp, Artificial Sequence
  Synthetic
ttgggtatgagaaagatcca

SEQ ID NO: 42631 - DNA, 20 bp, Artificial Sequence
  Synthetic
ctttctcatacccaaaacat

SEQ ID NO: 42632 - DNA, 20 bp, Artificial Sequence
  Synthetic
cagcatctgtccaatgtttt

SEQ ID NO: 42633 - DNA, 20 bp, Artificial Sequence
  Synthetic
gcagcatctgtccaatgttt

SEQ ID NO: 42634 - DNA, 20 bp, Artificial Sequence
  Synthetic
tactcatttcacacattctc

SEQ ID NO: 42635 - DNA, 20 bp, Artificial Sequence
  Synthetic
ttttttccttaagttcattg

SEQ ID NO: 42636 - DNA, 20 bp, Artificial Sequence
  Synthetic
attgtggtgtcactaaaaga

SEQ ID NO: 42637 - DNA, 20 bp, Artificial Sequence
  Synthetic
tcttttcaaaaccaagtttg

SEQ ID NO: 42638 - DNA, 20 bp, Artificial Sequence
  Synthetic
ttcaaaaccaagtttgtgga

SEQ ID NO: 42639 - DNA, 20 bp, Artificial Sequence
  Synthetic
agaaacaccatccacaaact

SEQ ID NO: 42640 - DNA, 20 bp, Artificial Sequence
  Synthetic
cggaatcatgtacataaagc

SEQ ID NO: 42641 - DNA, 20 bp, Artificial Sequence
  Synthetic
tatttactaggtgattatcc

SEQ ID NO: 42642 - DNA, 20 bp, Artificial Sequence
  Synthetic
atttactaggtgattatcca

SEQ ID NO: 42643 - DNA, 20 bp, Artificial Sequence
  Synthetic
ctctgtaacttcgaaaaccc

SEQ ID NO: 42644 - DNA, 20 bp, Artificial Sequence
  Synthetic
acattatgttttgaactgaa

SEQ ID NO: 42645 - DNA, 20 bp, Artificial Sequence
  Synthetic
cacattatgttttgaactga

SEQ ID NO: 42646 - DNA, 20 bp, Artificial Sequence
  Synthetic
agttcaaaacataatgtgat

SEQ ID NO: 42647 - DNA, 20 bp, Artificial Sequence
  Synthetic
aattttccagtgggcagaaa

SEQ ID NO: 42648 - DNA, 20 bp, Artificial Sequence
  Synthetic
ccagatccatttctgcccac

SEQ ID NO: 42649 - DNA, 20 bp, Artificial Sequence
  Synthetic
ccagtgggcagaaatggatc

SEQ ID NO: 42650 - DNA, 20 bp, Artificial Sequence
  Synthetic
ggaaaaagtaacttttttta

SEQ ID NO: 42651 - DNA, 20 bp, Artificial Sequence
  Synthetic
aaagtaactttttttatggt

SEQ ID NO: 42652 - DNA, 20 bp, Artificial Sequence
  Synthetic
ctgagaacaaactgaattgc

SEQ ID NO: 42653 - DNA, 20 bp, Artificial Sequence
  Synthetic
gtcatcttcgtccagaacag

SEQ ID NO: 42654 - DNA, 20 bp, Artificial Sequence
  Synthetic
tcttcgtccagaacagcggt

SEQ ID NO: 42655 - DNA, 20 bp, Artificial Sequence
  Synthetic
aataaagccaaccgctgttc

SEQ ID NO: 42656 - DNA, 20 bp, Artificial Sequence
  Synthetic
tttcatttttaggaaggtac

SEQ ID NO: 42657 - DNA, 20 bp, Artificial Sequence
  Synthetic
acaaaagcagaaataacacg

SEQ ID NO: 42658 - DNA, 20 bp, Artificial Sequence
  Synthetic
tcgtgttatttctgcttttg

SEQ ID NO: 42659 - DNA, 20 bp, Artificial Sequence
  Synthetic
tttttgataattcagacaac

SEQ ID NO: 42660 - DNA, 20 bp, Artificial Sequence
  Synthetic
aaaagttacttactggtaac

SEQ ID NO: 42661 - DNA, 20 bp, Artificial Sequence
  Synthetic
tttttcttagatcgataaag

SEQ ID NO: 42662 - DNA, 20 bp, Artificial Sequence
  Synthetic
gtttcacttcgaagagttat

SEQ ID NO: 42663 - DNA, 20 bp, Artificial Sequence
  Synthetic
aagagttattggtgccaaaa

SEQ ID NO: 42664 - DNA, 20 bp, Artificial Sequence
  Synthetic
taagaaatactgatcctttt

SEQ ID NO: 42665 - DNA, 20 bp, Artificial Sequence
  Synthetic
gtatttcttagacaagaaga

SEQ ID NO: 42666 - DNA, 20 bp, Artificial Sequence
  Synthetic
atgaacctccttgaaagcgc

SEQ ID NO: 42667 - DNA, 20 bp, Artificial Sequence
  Synthetic
aaaaaccagcgctttcaagg

SEQ ID NO: 42668 - DNA, 20 bp, Artificial Sequence
  Synthetic
gagaaaaaccagcgctttca

SEQ ID NO: 42669 - DNA, 20 bp, Artificial Sequence
  Synthetic
ccttgtttaacaatataata

SEQ ID NO: 42670 - DNA, 20 bp, Artificial Sequence
  Synthetic
ccttattatattgttaaaca

SEQ ID NO: 42671 - DNA, 20 bp, Artificial Sequence
  Synthetic
ttatattgttaaacaaggaa

SEQ ID NO: 42672 - DNA, 20 bp, Artificial Sequence
  Synthetic
aaaattttagatcaaccaga

SEQ ID NO: 42673 - DNA, 20 bp, Artificial Sequence
  Synthetic
aatctggtgctgttgccatc

SEQ ID NO: 42674 - DNA, 20 bp, Artificial Sequence
  Synthetic
agctttaatctctgagaatc

SEQ ID NO: 42675 - DNA, 20 bp, Artificial Sequence
  Synthetic
aagctattaagagaagtagc

SEQ ID NO: 42676 - DNA, 20 bp, Artificial Sequence
  Synthetic
tagagtgtatgacgaacgaa

SEQ ID NO: 42677 - DNA, 20 bp, Artificial Sequence
  Synthetic
atctccttaatgaaagaaac

SEQ ID NO: 42678 - DNA, 20 bp, Artificial Sequence
  Synthetic
tttacctgtttctttcatta

SEQ ID NO: 42679 - DNA, 20 bp, Artificial Sequence
  Synthetic
atttcttttaagagggcaaa

SEQ ID NO: 42680 - DNA, 20 bp, Artificial Sequence
  Synthetic
tttcttttaagagggcaaac

SEQ ID NO: 42681 - DNA, 20 bp, Artificial Sequence
  Synthetic
agagagattacatactctag

SEQ ID NO: 42682 - DNA, 20 bp, Artificial Sequence
  Synthetic
acatactctagaggaagaaa

SEQ ID NO: 42683 - DNA, 20 bp, Artificial Sequence
  Synthetic
aactagctcagtatcagaag

SEQ ID NO: 42684 - DNA, 20 bp, Artificial Sequence
  Synthetic
actagctcagtatcagaagt

SEQ ID NO: 42685 - DNA, 20 bp, Artificial Sequence
  Synthetic
ggataaaatgagacgagccc

SEQ ID NO: 42686 - DNA, 20 bp, Artificial Sequence
  Synthetic
attgtaaatggtatattcca

SEQ ID NO: 42687 - DNA, 20 bp, Artificial Sequence
  Synthetic
gattgtaaatggtatattcc

SEQ ID NO: 42688 - DNA, 20 bp, Artificial Sequence
  Synthetic
ggaatataccatttacaatc

SEQ ID NO: 42689 - DNA, 20 bp, Artificial Sequence
  Synthetic
gttaagttcctgattgtaaa

SEQ ID NO: 42690 - DNA, 20 bp, Artificial Sequence
  Synthetic
gactcgtgccaaacttgatg

SEQ ID NO: 42691 - DNA, 20 bp, Artificial Sequence
  Synthetic
atattttacctcatcaagtt

SEQ ID NO: 42692 - DNA, 20 bp, Artificial Sequence
  Synthetic
tctgctaagcgagagactag

SEQ ID NO: 42693 - DNA, 20 bp, Artificial Sequence
  Synthetic
ctgagcatctcttaattgtc

SEQ ID NO: 42694 - DNA, 20 bp, Artificial Sequence
  Synthetic
acaattaagagatgctcagc

SEQ ID NO: 42695 - DNA, 20 bp, Artificial Sequence
  Synthetic
gcaggatgcaagagataaaa

SEQ ID NO: 42696 - DNA, 20 bp, Artificial Sequence
  Synthetic
ggatgcaagagataaaatgg

SEQ ID NO: 42697 - DNA, 20 bp, Artificial Sequence
  Synthetic
ttgttttcaattctctaact

SEQ ID NO: 42698 - DNA, 20 bp, Artificial Sequence
  Synthetic
gacaagagcagattaagcag

SEQ ID NO: 42699 - DNA, 20 bp, Artificial Sequence
  Synthetic
gattaagcagaggactaagt

SEQ ID NO: 42700 - DNA, 20 bp, Artificial Sequence
  Synthetic
taagttggagcttaaagcca

SEQ ID NO: 42701 - DNA, 20 bp, Artificial Sequence
  Synthetic
tagttcatcttgtaaatcct

SEQ ID NO: 42702 - DNA, 20 bp, Artificial Sequence
  Synthetic
gatttacaagatgaactagc

SEQ ID NO: 42703 - DNA, 20 bp, Artificial Sequence
  Synthetic
tagcaggcaatagtgaacaa

SEQ ID NO: 42704 - DNA, 20 bp, Artificial Sequence
  Synthetic
agcaggcaatagtgaacaaa

SEQ ID NO: 42705 - DNA, 20 bp, Artificial Sequence
  Synthetic
agaaacgtttattaaaagag

SEQ ID NO: 42706 - DNA, 20 bp, Artificial Sequence
  Synthetic
agaagaaaagcagaaagaac

SEQ ID NO: 42707 - DNA, 20 bp, Artificial Sequence
  Synthetic
tctttcacactgttgaattt

SEQ ID NO: 42708 - DNA, 20 bp, Artificial Sequence
  Synthetic
ctctttcacactgttgaatt

SEQ ID NO: 42709 - DNA, 20 bp, Artificial Sequence
  Synthetic
gtgaaagagaaagaagaacg

SEQ ID NO: 42710 - DNA, 20 bp, Artificial Sequence
  Synthetic
aagaagaacgaggaattgct

SEQ ID NO: 42711 - DNA, 20 bp, Artificial Sequence
  Synthetic
tagattggctcaagctaccc

SEQ ID NO: 42712 - DNA, 20 bp, Artificial Sequence
  Synthetic
tcaagctacccaggaaagaa

SEQ ID NO: 42713 - DNA, 20 bp, Artificial Sequence
  Synthetic
ataaagatccgttctttcct

SEQ ID NO: 42714 - DNA, 20 bp, Artificial Sequence
  Synthetic
cataaagatccgttctttcc

SEQ ID NO: 42715 - DNA, 20 bp, Artificial Sequence
  Synthetic
aacggatctttatgcaaagc

SEQ ID NO: 42716 - DNA, 20 bp, Artificial Sequence
  Synthetic
acggatctttatgcaaagca

SEQ ID NO: 42717 - DNA, 20 bp, Artificial Sequence
  Synthetic
ctttatgcaaagcagggtcg

SEQ ID NO: 42718 - DNA, 20 bp, Artificial Sequence
  Synthetic
tttcttcttttgatgtaaac

SEQ ID NO: 42719 - DNA, 20 bp, Artificial Sequence
  Synthetic
agtttacatcaaaagaagaa

SEQ ID NO: 42720 - DNA, 20 bp, Artificial Sequence
  Synthetic
gtttacatcaaaagaagaaa

SEQ ID NO: 42721 - DNA, 20 bp, Artificial Sequence
  Synthetic
caaaagaagaaagggataag

SEQ ID NO: 42722 - DNA, 20 bp, Artificial Sequence
  Synthetic
aagggataagtggattaaaa

SEQ ID NO: 42723 - DNA, 20 bp, Artificial Sequence
  Synthetic
ggaactcaagtctttagatc

SEQ ID NO: 42724 - DNA, 20 bp, Artificial Sequence
  Synthetic
acagattgctgctatacata

SEQ ID NO: 42725 - DNA, 20 bp, Artificial Sequence
  Synthetic
tgctgctatacataaggatt

SEQ ID NO: 42726 - DNA, 20 bp, Artificial Sequence
  Synthetic
agcaaataaagagaaaaatc

SEQ ID NO: 42727 - DNA, 20 bp, Artificial Sequence
  Synthetic
atttttatttccatagaaac

SEQ ID NO: 42728 - DNA, 20 bp, Artificial Sequence
  Synthetic
atttccatagaaactggacc

SEQ ID NO: 42729 - DNA, 20 bp, Artificial Sequence
  Synthetic
ctttgacttcattaagatcc

SEQ ID NO: 42730 - DNA, 20 bp, Artificial Sequence
  Synthetic
caaagctcgagtagaagaac

SEQ ID NO: 42731 - DNA, 20 bp, Artificial Sequence
  Synthetic
ttttatttattagctacttg

SEQ ID NO: 42732 - DNA, 20 bp, Artificial Sequence
  Synthetic
caacttcttagagcagcaac

SEQ ID NO: 42733 - DNA, 20 bp, Artificial Sequence
  Synthetic
tcttagagcagcaacaggaa

SEQ ID NO: 42734 - DNA, 20 bp, Artificial Sequence
  Synthetic
tagagcagcaacaggaaagg

SEQ ID NO: 42735 - DNA, 20 bp, Artificial Sequence
  Synthetic
agagcagcaacaggaaaggt

SEQ ID NO: 42736 - DNA, 20 bp, Artificial Sequence
  Synthetic
aacttacaggccattttaaa

SEQ ID NO: 42737 - DNA, 20 bp, Artificial Sequence
  Synthetic
gctgtctattccatttaaaa

SEQ ID NO: 42738 - DNA, 20 bp, Artificial Sequence
  Synthetic
ctagaccacttccgtcgaaa

SEQ ID NO: 42739 - DNA, 20 bp, Artificial Sequence
  Synthetic
ttattccttttcgacggaag

SEQ ID NO: 42740 - DNA, 20 bp, Artificial Sequence
  Synthetic
gctggtttattccttttcga

SEQ ID NO: 42741 - DNA, 20 bp, Artificial Sequence
  Synthetic
ataaaccagcatgttcaaaa

SEQ ID NO: 42742 - DNA, 20 bp, Artificial Sequence
  Synthetic
gatagccattttgaacatgc

SEQ ID NO: 42743 - DNA, 20 bp, Artificial Sequence
  Synthetic
catgttcaaaatggctatca

SEQ ID NO: 42744 - DNA, 20 bp, Artificial Sequence
  Synthetic
accagctttctacacatgcg

SEQ ID NO: 42745 - DNA, 20 bp, Artificial Sequence
  Synthetic
tccacgcatgtgtagaaagc

SEQ ID NO: 42746 - DNA, 20 bp, Artificial Sequence
  Synthetic
acatgcgtggaagtcactgc

SEQ ID NO: 42747 - DNA, 20 bp, Artificial Sequence
  Synthetic
tggaagtcactgctggaaac

SEQ ID NO: 42748 - DNA, 20 bp, Artificial Sequence
  Synthetic
agtcagcacgaagattttaa

SEQ ID NO: 42749 - DNA, 20 bp, Artificial Sequence
  Synthetic
tttaataaaatgaatcttcc

SEQ ID NO: 42750 - DNA, 20 bp, Artificial Sequence
  Synthetic
taaaatgaatcttcctggag

SEQ ID NO: 42751 - DNA, 20 bp, Artificial Sequence
  Synthetic
ggcagaaaagtaacctctcc

SEQ ID NO: 42752 - DNA, 20 bp, Artificial Sequence
  Synthetic
ctgacatctaacttgttaag

SEQ ID NO: 42753 - DNA, 20 bp, Artificial Sequence
  Synthetic
ctcttaacaagttagatgtc

SEQ ID NO: 42754 - DNA, 20 bp, Artificial Sequence
  Synthetic
tcttaacaagttagatgtca

SEQ ID NO: 42755 - DNA, 20 bp, Artificial Sequence
  Synthetic
actcacattggtttcaggat

SEQ ID NO: 42756 - DNA, 20 bp, Artificial Sequence
  Synthetic
caatgactcacattggtttc

SEQ ID NO: 42757 - DNA, 20 bp, Artificial Sequence
  Synthetic
ttcctatgatcagcaaactg

SEQ ID NO: 42758 - DNA, 20 bp, Artificial Sequence
  Synthetic
tacctcagtttgctgatcat

SEQ ID NO: 42759 - DNA, 20 bp, Artificial Sequence
  Synthetic
ttgaaagctttgtcaaatct

SEQ ID NO: 42760 - DNA, 20 bp, Artificial Sequence
  Synthetic
tttgaaagctttgtcaaatc

SEQ ID NO: 42761 - DNA, 20 bp, Artificial Sequence
  Synthetic
aaagctttcaaacatgtgtt

SEQ ID NO: 42762 - DNA, 20 bp, Artificial Sequence
  Synthetic
gactcttatttgtcgtagca

SEQ ID NO: 42763 - DNA, 20 bp, Artificial Sequence
  Synthetic
catggaagtttcaacccagc

SEQ ID NO: 42764 - DNA, 20 bp, Artificial Sequence
  Synthetic
agtgaaagcacgggccagct

SEQ ID NO: 42765 - DNA, 20 bp, Artificial Sequence
  Synthetic
tagtgaaagcacgggccagc

SEQ ID NO: 42766 - DNA, 20 bp, Artificial Sequence
  Synthetic
gctggcccgtgctttcacta

SEQ ID NO: 42767 - DNA, 20 bp, Artificial Sequence
  Synthetic
acagtccatagtgaaagcac

SEQ ID NO: 42768 - DNA, 20 bp, Artificial Sequence
  Synthetic
tacagtccatagtgaaagca

SEQ ID NO: 42769 - DNA, 20 bp, Artificial Sequence
  Synthetic
cactatggactgtattactt

SEQ ID NO: 42770 - DNA, 20 bp, Artificial Sequence
  Synthetic
atggactgtattactttgga

SEQ ID NO: 42771 - DNA, 20 bp, Artificial Sequence
  Synthetic
taggtgaccaagtcagccat

SEQ ID NO: 42772 - DNA, 20 bp, Artificial Sequence
  Synthetic
aggtgaccaagtcagccatc

SEQ ID NO: 42773 - DNA, 20 bp, Artificial Sequence
  Synthetic
ggtgaccaagtcagccatcg

SEQ ID NO: 42774 - DNA, 20 bp, Artificial Sequence
  Synthetic
gagcaccccgatggctgact

SEQ ID NO: 42775 - DNA, 20 bp, Artificial Sequence
  Synthetic
agccatcggggtgctctaac

SEQ ID NO: 42776 - DNA, 20 bp, Artificial Sequence
  Synthetic
gccatcggggtgctctaact

SEQ ID NO: 42777 - DNA, 20 bp, Artificial Sequence
  Synthetic
ccccagttagagcaccccga

SEQ ID NO: 42778 - DNA, 20 bp, Artificial Sequence
  Synthetic
ccatcggggtgctctaactg

SEQ ID NO: 42779 - DNA, 20 bp, Artificial Sequence
  Synthetic
catcggggtgctctaactgg

SEQ ID NO: 42780 - DNA, 20 bp, Artificial Sequence
  Synthetic
ctgggggttattatgacaca

SEQ ID NO: 42781 - DNA, 20 bp, Artificial Sequence
  Synthetic
agaaaagcagaagaagaact

SEQ ID NO: 42782 - DNA, 20 bp, Artificial Sequence
  Synthetic
tattttcaatatttctgcgc

SEQ ID NO: 42783 - DNA, 20 bp, Artificial Sequence
  Synthetic
gggtctcgatctgttgcatt

SEQ ID NO: 42784 - DNA, 20 bp, Artificial Sequence
  Synthetic
aacagatcgagacccagcaa

SEQ ID NO: 42785 - DNA, 20 bp, Artificial Sequence
  Synthetic
tgctttaaatttcctttgct

SEQ ID NO: 42786 - DNA, 20 bp, Artificial Sequence
  Synthetic
atgctttaaatttcctttgc

SEQ ID NO: 42787 - DNA, 20 bp, Artificial Sequence
  Synthetic
tgaagatgctaaaagagaag

SEQ ID NO: 42788 - DNA, 20 bp, Artificial Sequence
  Synthetic
agagaaaaccttcatgccta

SEQ ID NO: 42789 - DNA, 20 bp, Artificial Sequence
  Synthetic
cttacgaaccttaggcatga

SEQ ID NO: 42790 - DNA, 20 bp, Artificial Sequence
  Synthetic
aagatatacttacgaacctt

SEQ ID NO: 42791 - DNA, 20 bp, Artificial Sequence
  Synthetic
gcaacgtagcttacagagtt

SEQ ID NO: 42792 - DNA, 20 bp, Artificial Sequence
  Synthetic
acgtagcttacagagtttgg

SEQ ID NO: 42793 - DNA, 20 bp, Artificial Sequence
  Synthetic
ggaggcaagcttgcatgcta

SEQ ID NO: 42794 - DNA, 20 bp, Artificial Sequence
  Synthetic
ttctgctttcaatgactctc

SEQ ID NO: 42795 - DNA, 20 bp, Artificial Sequence
  Synthetic
agagtcattgaaagcagaac

SEQ ID NO: 42796 - DNA, 20 bp, Artificial Sequence
  Synthetic
gagtcattgaaagcagaact

SEQ ID NO: 42797 - DNA, 20 bp, Artificial Sequence
  Synthetic
tttgctttctcaactgagtt

SEQ ID NO: 42798 - DNA, 20 bp, Artificial Sequence
  Synthetic
tgagattcgtcaacttcagc

SEQ ID NO: 42799 - DNA, 20 bp, Artificial Sequence
  Synthetic
aatgaaagaattaaattaga

SEQ ID NO: 42800 - DNA, 20 bp, Artificial Sequence
  Synthetic
tgagaatctgagaaaacgct

SEQ ID NO: 42801 - DNA, 20 bp, Artificial Sequence
  Synthetic
acgcttggaccaagtagaac

SEQ ID NO: 42802 - DNA, 20 bp, Artificial Sequence
  Synthetic
acatacacacctgttctact

SEQ ID NO: 42803 - DNA, 20 bp, Artificial Sequence
  Synthetic
aatgagctgagagagacaga

SEQ ID NO: 42804 - DNA, 20 bp, Artificial Sequence
  Synthetic
atgagctgagagagacagaa

SEQ ID NO: 42805 - DNA, 20 bp, Artificial Sequence
  Synthetic
tgagctgagagagacagaag

SEQ ID NO: 42806 - DNA, 20 bp, Artificial Sequence
  Synthetic
gagctgagagagacagaagg

SEQ ID NO: 42807 - DNA, 20 bp, Artificial Sequence
  Synthetic
ggcttcaagttctgatgttg

SEQ ID NO: 42808 - DNA, 20 bp, Artificial Sequence
  Synthetic
gtcttttactcttttattga

SEQ ID NO: 42809 - DNA, 20 bp, Artificial Sequence
  Synthetic
taaaagagtaaaagacacta

SEQ ID NO: 42810 - DNA, 20 bp, Artificial Sequence
  Synthetic
gacactatggcacgatcaga

SEQ ID NO: 42811 - DNA, 20 bp, Artificial Sequence
  Synthetic
tccattgataaaacagaagc

SEQ ID NO: 42812 - DNA, 20 bp, Artificial Sequence
  Synthetic
tccagcttctgttttatcaa

SEQ ID NO: 42813 - DNA, 20 bp, Artificial Sequence
  Synthetic
taaaacagaagctggaatta

SEQ ID NO: 42814 - DNA, 20 bp, Artificial Sequence
  Synthetic
taaggagcttcagaagagta

SEQ ID NO: 42815 - DNA, 20 bp, Artificial Sequence
  Synthetic
ttcagaagagtatggagcgc

SEQ ID NO: 42816 - DNA, 20 bp, Artificial Sequence
  Synthetic
tatggagcgctggaaaaata

SEQ ID NO: 42817 - DNA, 20 bp, Artificial Sequence
  Synthetic
aaatatggaaaaagaacata

SEQ ID NO: 42818 - DNA, 20 bp, Artificial Sequence
  Synthetic
aaatcatgatactaaagaac

SEQ ID NO: 42819 - DNA, 20 bp, Artificial Sequence
  Synthetic
aactggaaaagatgacaaat

SEQ ID NO: 42820 - DNA, 20 bp, Artificial Sequence
  Synthetic
gaaaagatgacaaatcggca

SEQ ID NO: 42821 - DNA, 20 bp, Artificial Sequence
  Synthetic
atgaagaaaattcgagaact

SEQ ID NO: 42822 - DNA, 20 bp, Artificial Sequence
  Synthetic
agaacttggatcacttcccc

SEQ ID NO: 42823 - DNA, 20 bp, Artificial Sequence
  Synthetic
tacttttcaaatgcttcctg

SEQ ID NO: 42824 - DNA, 20 bp, Artificial Sequence
  Synthetic
gtacttttcaaatgcttcct

SEQ ID NO: 42825 - DNA, 20 bp, Artificial Sequence
  Synthetic
ggtacttttcaaatgcttcc

SEQ ID NO: 42826 - DNA, 20 bp, Artificial Sequence
  Synthetic
cctgtttgaggctcagtgtc

SEQ ID NO: 42827 - DNA, 20 bp, Artificial Sequence
  Synthetic
ccagacactgagcctcaaac

SEQ ID NO: 42828 - DNA, 20 bp, Artificial Sequence
  Synthetic
acactgagcctcaaacaggt

SEQ ID NO: 42829 - DNA, 20 bp, Artificial Sequence
  Synthetic
atttaaaaccaacctgtttg

SEQ ID NO: 42830 - DNA, 20 bp, Artificial Sequence
  Synthetic
gtacagccatgttaacaaaa

SEQ ID NO: 42831 - DNA, 20 bp, Artificial Sequence
  Synthetic
ccaaagcctttttgttaaca

SEQ ID NO: 42832 - DNA, 20 bp, Artificial Sequence
  Synthetic
ccatgttaacaaaaaggctt

SEQ ID NO: 42833 - DNA, 20 bp, Artificial Sequence
  Synthetic
tattaacttttctttctgct

SEQ ID NO: 42834 - DNA, 20 bp, Artificial Sequence
  Synthetic
agcgtcaagaagagttagat

SEQ ID NO: 42835 - DNA, 20 bp, Artificial Sequence
  Synthetic
gcgtcaagaagagttagata

SEQ ID NO: 42836 - DNA, 20 bp, Artificial Sequence
  Synthetic
cgtcaagaagagttagatag

SEQ ID NO: 42837 - DNA, 20 bp, Artificial Sequence
  Synthetic
taggggttacaaatcaatca

SEQ ID NO: 42838 - DNA, 20 bp, Artificial Sequence
  Synthetic
tgatgaatgtacttgaactt

SEQ ID NO: 42839 - DNA, 20 bp, Artificial Sequence
  Synthetic
tattcagttaactttcaaac

SEQ ID NO: 42840 - DNA, 20 bp, Artificial Sequence
  Synthetic
gtattccagaagttagtacc

SEQ ID NO: 42841 - DNA, 20 bp, Artificial Sequence
  Synthetic
ttccagaagttagtacctgg

SEQ ID NO: 42842 - DNA, 20 bp, Artificial Sequence
  Synthetic
tgccaccaggtactaacttc

SEQ ID NO: 42843 - DNA, 20 bp, Artificial Sequence
  Synthetic
acctggtggcaaagctactt

SEQ ID NO: 42844 - DNA, 20 bp, Artificial Sequence
  Synthetic
accaaagtagctttgccacc

SEQ ID NO: 42845 - DNA, 20 bp, Artificial Sequence
  Synthetic
gctactttggtgatgaagaa

SEQ ID NO: 42846 - DNA, 20 bp, Artificial Sequence
  Synthetic
ggtgatgaagaaaggagatg

SEQ ID NO: 42847 - DNA, 20 bp, Artificial Sequence
  Synthetic
gatgaagaaaggagatgtgg

SEQ ID NO: 42848 - DNA, 20 bp, Artificial Sequence
  Synthetic
atgaagaaaggagatgtgga

SEQ ID NO: 42849 - DNA, 20 bp, Artificial Sequence
  Synthetic
ggcagtcagtctcaagatga

SEQ ID NO: 42850 - DNA, 20 bp, Artificial Sequence
  Synthetic
cagtctcaagatgaaggaga

SEQ ID NO: 42851 - DNA, 20 bp, Artificial Sequence
  Synthetic
agtctcaagatgaaggagaa

SEQ ID NO: 42852 - DNA, 20 bp, Artificial Sequence
  Synthetic
caagatgaaggagaagggag

SEQ ID NO: 42853 - DNA, 20 bp, Artificial Sequence
  Synthetic
aagggagtggtgagagtgag

SEQ ID NO: 42854 - DNA, 20 bp, Artificial Sequence
  Synthetic
agggagtggtgagagtgaga

SEQ ID NO: 42855 - DNA, 20 bp, Artificial Sequence
  Synthetic
gggagtggtgagagtgagag

SEQ ID NO: 42856 - DNA, 20 bp, Artificial Sequence
  Synthetic
ggtgagagtgagaggggttc

SEQ ID NO: 42857 - DNA, 20 bp, Artificial Sequence
  Synthetic
cagtaaactggtcaactgat

SEQ ID NO: 42858 - DNA, 20 bp, Artificial Sequence
  Synthetic
ccagtaaactggtcaactga

SEQ ID NO: 42859 - DNA, 20 bp, Artificial Sequence
  Synthetic
ccatcagttgaccagtttac

SEQ ID NO: 42860 - DNA, 20 bp, Artificial Sequence
  Synthetic
gttgaccagtttactggagt

SEQ ID NO: 42861 - DNA, 20 bp, Artificial Sequence
  Synthetic
taattccaactccagtaaac

SEQ ID NO: 42862 - DNA, 20 bp, Artificial Sequence
  Synthetic
agtttactggagttggaatt

SEQ ID NO: 42863 - DNA, 20 bp, Artificial Sequence
  Synthetic
gtttactggagttggaatta

SEQ ID NO: 42864 - DNA, 20 bp, Artificial Sequence
  Synthetic
tatttttaggtgtcatttac

SEQ ID NO: 42865 - DNA, 20 bp, Artificial Sequence
  Synthetic
gtgtcatttacaggaaaaca

SEQ ID NO: 42866 - DNA, 20 bp, Artificial Sequence
  Synthetic
agagaaatgcaacagctttc

SEQ ID NO: 42867 - DNA, 20 bp, Artificial Sequence
  Synthetic
gaaatgcaacagctttcagg

SEQ ID NO: 42868 - DNA, 20 bp, Artificial Sequence
  Synthetic
ttcaggtggacagaaatcct

SEQ ID NO: 42869 - DNA, 20 bp, Artificial Sequence
  Synthetic
aatcagagcaagggctacca

SEQ ID NO: 42870 - DNA, 20 bp, Artificial Sequence
  Synthetic
aatggcaaaaatcagagcaa

SEQ ID NO: 42871 - DNA, 20 bp, Artificial Sequence
  Synthetic
gaatggcaaaaatcagagca

SEQ ID NO: 42872 - DNA, 20 bp, Artificial Sequence
  Synthetic
tgccattcagaaatgtgacc

SEQ ID NO: 42873 - DNA, 20 bp, Artificial Sequence
  Synthetic
agccgggtcacatttctgaa

SEQ ID NO: 42874 - DNA, 20 bp, Artificial Sequence
  Synthetic
caaacaagtaaaatggagcc

SEQ ID NO: 42875 - DNA, 20 bp, Artificial Sequence
  Synthetic
tcaaacaagtaaaatggagc

SEQ ID NO: 42876 - DNA, 20 bp, Artificial Sequence
  Synthetic
atttcatcaaacaagtaaaa

SEQ ID NO: 42877 - DNA, 20 bp, Artificial Sequence
  Synthetic
cttgtttgatgaaattgacc

SEQ ID NO: 42878 - DNA, 20 bp, Artificial Sequence
  Synthetic
tgatgaaattgaccaggctc

SEQ ID NO: 42879 - DNA, 20 bp, Artificial Sequence
  Synthetic
tgtgctgagcatccagagcc

SEQ ID NO: 42880 - DNA, 20 bp, Artificial Sequence
  Synthetic
tctggatgctcagcacagaa

SEQ ID NO: 42881 - DNA, 20 bp, Artificial Sequence
  Synthetic
cagcacagaaaggctgtgtc

SEQ ID NO: 42882 - DNA, 20 bp, Artificial Sequence
  Synthetic
tctttttacagatatgatta

SEQ ID NO: 42883 - DNA, 20 bp, Artificial Sequence
  Synthetic
agtttattacaactactttt

SEQ ID NO: 42884 - DNA, 20 bp, Artificial Sequence
  Synthetic
tcagctgactcaagcagttc

SEQ ID NO: 42885 - DNA, 20 bp, Artificial Sequence
  Synthetic
gagtcagctgacaaattcta

SEQ ID NO: 42886 - DNA, 20 bp, Artificial Sequence
  Synthetic
tggtgtaaagttcagaaata

SEQ ID NO: 42887 - DNA, 20 bp, Artificial Sequence
  Synthetic
cagcataggatttgaagttc

SEQ ID NO: 42888 - DNA, 20 bp, Artificial Sequence
  Synthetic
cagaacttcaaatcctatgc

SEQ ID NO: 42889 - DNA, 20 bp, Artificial Sequence
  Synthetic
agaacttcaaatcctatgct

SEQ ID NO: 42890 - DNA, 20 bp, Artificial Sequence
  Synthetic
gaacttcaaatcctatgctg

SEQ ID NO: 42891 - DNA, 20 bp, Artificial Sequence
  Synthetic
cagaattttctccccagcat

SEQ ID NO: 42892 - DNA, 20 bp, Artificial Sequence
  Synthetic
ctatgctggggagaaaattc

SEQ ID NO: 42893 - DNA, 20 bp, Artificial Sequence
  Synthetic
tatgctggggagaaaattct

SEQ ID NO: 42894 - DNA, 20 bp, Artificial Sequence
  Synthetic
aattctgggacctttccata

SEQ ID NO: 42895 - DNA, 20 bp, Artificial Sequence
  Synthetic
catacaaataccttatggaa

SEQ ID NO: 42896 - DNA, 20 bp, Artificial Sequence
  Synthetic
atttccatacaaatacctta

SEQ ID NO: 42897 - DNA, 20 bp, Artificial Sequence
  Synthetic
cagcgcttttcctgtattat

SEQ ID NO: 42898 - DNA, 20 bp, Artificial Sequence
  Synthetic
agcgcttttcctgtattatc

SEQ ID NO: 42899 - DNA, 20 bp, Artificial Sequence
  Synthetic
tcctgtattatcgggccaaa

SEQ ID NO: 42900 - DNA, 20 bp, Artificial Sequence
  Synthetic
gccatttggcccgataatac

SEQ ID NO: 42901 - DNA, 20 bp, Artificial Sequence
  Synthetic
attatcgggccaaatggcag

SEQ ID NO: 42902 - DNA, 20 bp, Artificial Sequence
  Synthetic
ttggatttgccactgccatt

SEQ ID NO: 42903 - DNA, 20 bp, Artificial Sequence
  Synthetic
aagcatagaatcaataacat

SEQ ID NO: 42904 - DNA, 20 bp, Artificial Sequence
  Synthetic
gattctatgctttttgtgtt

SEQ ID NO: 42905 - DNA, 20 bp, Artificial Sequence
  Synthetic
acataattctgatgaacaca

SEQ ID NO: 42906 - DNA, 20 bp, Artificial Sequence
  Synthetic
ttttcaaaagataattgata

SEQ ID NO: 42907 - DNA, 20 bp, Artificial Sequence
  Synthetic
tttttcctcaaaacaggaag

SEQ ID NO: 42908 - DNA, 20 bp, Artificial Sequence
  Synthetic
gatacatagaaattactgtt

SEQ ID NO: 42909 - DNA, 20 bp, Artificial Sequence
  Synthetic
taatttctatgtatccagaa

SEQ ID NO: 42910 - DNA, 20 bp, Artificial Sequence
  Synthetic
attatctctgcaggccgttc

SEQ ID NO: 42911 - DNA, 20 bp, Artificial Sequence
  Synthetic
gacagaagtattatctctgc

SEQ ID NO: 42912 - DNA, 20 bp, Artificial Sequence
  Synthetic
acttctgtctatcacataag

SEQ ID NO: 42913 - DNA, 20 bp, Artificial Sequence
  Synthetic
tggaaagaaaaagacattta

SEQ ID NO: 42914 - DNA, 20 bp, Artificial Sequence
  Synthetic
aaaaagacatttaaggatgt

SEQ ID NO: 42915 - DNA, 20 bp, Artificial Sequence
  Synthetic
ggaaatcttcttcgaagcca

SEQ ID NO: 42916 - DNA, 20 bp, Artificial Sequence
  Synthetic
tcgaagccatggaattgact

SEQ ID NO: 42917 - DNA, 20 bp, Artificial Sequence
  Synthetic
tatggtccaagtcaattcca

SEQ ID NO: 42918 - DNA, 20 bp, Artificial Sequence
  Synthetic
gtaaaattaaaaatctatta

SEQ ID NO: 42919 - DNA, 20 bp, Artificial Sequence
  Synthetic
taatagatttttaattttac

SEQ ID NO: 42920 - DNA, 20 bp, Artificial Sequence
  Synthetic
attgctatgatgaaaccaaa

SEQ ID NO: 42921 - DNA, 20 bp, Artificial Sequence
  Synthetic
tcgtgttcagtctggccttt

SEQ ID NO: 42922 - DNA, 20 bp, Artificial Sequence
  Synthetic
aggccagactgaacacgatg

SEQ ID NO: 42923 - DNA, 20 bp, Artificial Sequence
  Synthetic
ggccagactgaacacgatga

SEQ ID NO: 42924 - DNA, 20 bp, Artificial Sequence
  Synthetic
taccctcatcgtgttcagtc

SEQ ID NO: 42925 - DNA, 20 bp, Artificial Sequence
  Synthetic
gaatatttagaagatataat

SEQ ID NO: 42926 - DNA, 20 bp, Artificial Sequence
  Synthetic
ttagaagatataattggttg

SEQ ID NO: 42927 - DNA, 20 bp, Artificial Sequence
  Synthetic
aagatataattggttgtgga

SEQ ID NO: 42928 - DNA, 20 bp, Artificial Sequence
  Synthetic
aacctattaaagtcttgtgt

SEQ ID NO: 42929 - DNA, 20 bp, Artificial Sequence
  Synthetic
ctccgacacaagactttaat

SEQ ID NO: 42930 - DNA, 20 bp, Artificial Sequence
  Synthetic
gaaatattaaatgaacacag

SEQ ID NO: 42931 - DNA, 20 bp, Artificial Sequence
  Synthetic
aaatgaacacagaggagaga

SEQ ID NO: 42932 - DNA, 20 bp, Artificial Sequence
  Synthetic
tttaatttctgtagttaaac

SEQ ID NO: 42933 - DNA, 20 bp, Artificial Sequence
  Synthetic
ttaatttctgtagttaaaca

SEQ ID NO: 42934 - DNA, 20 bp, Artificial Sequence
  Synthetic
gtagttaaacagggtaaaga

SEQ ID NO: 42935 - DNA, 20 bp, Artificial Sequence
  Synthetic
gttaaacagggtaaagatgg

SEQ ID NO: 42936 - DNA, 20 bp, Artificial Sequence
  Synthetic
cagggtaaagatggtggaaa

SEQ ID NO: 42937 - DNA, 20 bp, Artificial Sequence
  Synthetic
aaagatggtggaaaaggaaa

SEQ ID NO: 42938 - DNA, 20 bp, Artificial Sequence
  Synthetic
aaggaaaaggatgccttaga

SEQ ID NO: 42939 - DNA, 20 bp, Artificial Sequence
  Synthetic
tatgtttttctctccttcta

SEQ ID NO: 42940 - DNA, 20 bp, Artificial Sequence
  Synthetic
agctatcgaatttcttacct

SEQ ID NO: 42941 - DNA, 20 bp, Artificial Sequence
  Synthetic
tctaaatatttcattttcca

SEQ ID NO: 42942 - DNA, 20 bp, Artificial Sequence
  Synthetic
gcagaaacgaattgctgaaa

SEQ ID NO: 42943 - DNA, 20 bp, Artificial Sequence
  Synthetic
tgctgaaatggaaactcaaa

SEQ ID NO: 42944 - DNA, 20 bp, Artificial Sequence
  Synthetic
gctcttctcattaatttctt

SEQ ID NO: 42945 - DNA, 20 bp, Artificial Sequence
  Synthetic
taaaattacaaaatttattg

SEQ ID NO: 42946 - DNA, 20 bp, Artificial Sequence
  Synthetic
aaaatttacacagctagatt

SEQ ID NO: 42947 - DNA, 20 bp, Artificial Sequence
  Synthetic
cagttttttggctttactcg

SEQ ID NO: 42948 - DNA, 20 bp, Artificial Sequence
  Synthetic
cacgagtaaagccaaaaaac

SEQ ID NO: 42949 - DNA, 20 bp, Artificial Sequence
  Synthetic
aagttgtttctccagttttt

SEQ ID NO: 42950 - DNA, 20 bp, Artificial Sequence
  Synthetic
acttcaaaaagataaagaaa

SEQ ID NO: 42951 - DNA, 20 bp, Artificial Sequence
  Synthetic
caaaaagataaagaaaaggt

SEQ ID NO: 42952 - DNA, 20 bp, Artificial Sequence
  Synthetic
atgatattgttactcttggc

SEQ ID NO: 42953 - DNA, 20 bp, Artificial Sequence
  Synthetic
attaatgatattgttactct

SEQ ID NO: 42954 - DNA, 20 bp, Artificial Sequence
  Synthetic
cttctcgagggcattgtttc

SEQ ID NO: 42955 - DNA, 20 bp, Artificial Sequence
  Synthetic
cagaaacaatgccctcgaga

SEQ ID NO: 42956 - DNA, 20 bp, Artificial Sequence
  Synthetic
tttctctttttccttctcga

SEQ ID NO: 42957 - DNA, 20 bp, Artificial Sequence
  Synthetic
ctttctctttttccttctcg

SEQ ID NO: 42958 - DNA, 20 bp, Artificial Sequence
  Synthetic
gaaagaagaaaaaaaattaa

SEQ ID NO: 42959 - DNA, 20 bp, Artificial Sequence
  Synthetic
aaaaaaattaaaggaagtta

SEQ ID NO: 42960 - DNA, 20 bp, Artificial Sequence
  Synthetic
agttatggatagccttaaac

SEQ ID NO: 42961 - DNA, 20 bp, Artificial Sequence
  Synthetic
agccttaaacaggaaacaca

SEQ ID NO: 42962 - DNA, 20 bp, Artificial Sequence
  Synthetic
gccttaaacaggaaacacaa

SEQ ID NO: 42963 - DNA, 20 bp, Artificial Sequence
  Synthetic
gcccttgtgtttcctgttta

SEQ ID NO: 42964 - DNA, 20 bp, Artificial Sequence
  Synthetic
gagtcgagagaaagaactta

SEQ ID NO: 42965 - DNA, 20 bp, Artificial Sequence
  Synthetic
agtcgagagaaagaacttat

SEQ ID NO: 42966 - DNA, 20 bp, Artificial Sequence
  Synthetic
acttatgggtttcagcaaat

SEQ ID NO: 42967 - DNA, 20 bp, Artificial Sequence
  Synthetic
aaatgaagcacgttcaaaga

SEQ ID NO: 42968 - DNA, 20 bp, Artificial Sequence
  Synthetic
atagatatcaagttctgact

SEQ ID NO: 42969 - DNA, 20 bp, Artificial Sequence
  Synthetic
gatagatatcaagttctgac

SEQ ID NO: 42970 - DNA, 20 bp, Artificial Sequence
  Synthetic
tgcagtgtctcaattaacta

SEQ ID NO: 42971 - DNA, 20 bp, Artificial Sequence
  Synthetic
gtctcaattaactaaggcta

SEQ ID NO: 42972 - DNA, 20 bp, Artificial Sequence
  Synthetic
cttctgagactctcaaagaa

SEQ ID NO: 42973 - DNA, 20 bp, Artificial Sequence
  Synthetic
gctgcaatcagagatataga

SEQ ID NO: 42974 - DNA, 20 bp, Artificial Sequence
  Synthetic
ttaattcttgttcagtttga

SEQ ID NO: 42975 - DNA, 20 bp, Artificial Sequence
  Synthetic
tttaattcttgttcagtttg

SEQ ID NO: 42976 - DNA, 20 bp, Artificial Sequence
  Synthetic
tcaaactgaacaagaattaa

SEQ ID NO: 42977 - DNA, 20 bp, Artificial Sequence
  Synthetic
aactgaacaagaattaaagg

SEQ ID NO: 42978 - DNA, 20 bp, Artificial Sequence
  Synthetic
agaaacaaactttaaaagtt

SEQ ID NO: 42979 - DNA, 20 bp, Artificial Sequence
  Synthetic
cattagcaatgaatcgaagt

SEQ ID NO: 42980 - DNA, 20 bp, Artificial Sequence
  Synthetic
attagcaatgaatcgaagta

SEQ ID NO: 42981 - DNA, 20 bp, Artificial Sequence
  Synthetic
ttagcaatgaatcgaagtag

SEQ ID NO: 42982 - DNA, 20 bp, Artificial Sequence
  Synthetic
tagcaatgaatcgaagtagg

SEQ ID NO: 42983 - DNA, 20 bp, Artificial Sequence
  Synthetic
tttcttgaattattgcatca

SEQ ID NO: 42984 - DNA, 20 bp, Artificial Sequence
  Synthetic
ataattcaagaaaaaaaatc

SEQ ID NO: 42985 - DNA, 20 bp, Artificial Sequence
  Synthetic
ttcaagaaaaaaaatctggc

SEQ ID NO: 42986 - DNA, 20 bp, Artificial Sequence
  Synthetic
aaaaaatctggcaggattcc

SEQ ID NO: 42987 - DNA, 20 bp, Artificial Sequence
  Synthetic
ggcaggattccaggaatata

SEQ ID NO: 42988 - DNA, 20 bp, Artificial Sequence
  Synthetic
tccaggaatatatggaagat

SEQ ID NO: 42989 - DNA, 20 bp, Artificial Sequence
  Synthetic
accaatcttccatatattcc

SEQ ID NO: 42990 - DNA, 20 bp, Artificial Sequence
  Synthetic
cttcattattagggggactt

SEQ ID NO: 42991 - DNA, 20 bp, Artificial Sequence
  Synthetic
cacgtcgtatttttcatcaa

SEQ ID NO: 42992 - DNA, 20 bp, Artificial Sequence
  Synthetic
cattgatgaaaaatacgacg

SEQ ID NO: 42993 - DNA, 20 bp, Artificial Sequence
  Synthetic
atcatcctgttgtcatgcac

SEQ ID NO: 42994 - DNA, 20 bp, Artificial Sequence
  Synthetic
gtagtccagtgcatgacaac

SEQ ID NO: 42995 - DNA, 20 bp, Artificial Sequence
  Synthetic
aaggaagtttacacattctt

SEQ ID NO: 42996 - DNA, 20 bp, Artificial Sequence
  Synthetic
taaggaagtttacacattct

SEQ ID NO: 42997 - DNA, 20 bp, Artificial Sequence
  Synthetic
ttccttaaaagacaaaatat

SEQ ID NO: 42998 - DNA, 20 bp, Artificial Sequence
  Synthetic
ctccaatattttgtctttta

SEQ ID NO: 42999 - DNA, 20 bp, Artificial Sequence
  Synthetic
attggagttgcaacctttat

SEQ ID NO: 43000 - DNA, 20 bp, Artificial Sequence
  Synthetic
aacctttataggtttagata

SEQ ID NO: 43001 - DNA, 20 bp, Artificial Sequence
  Synthetic
caccttatctaaacctataa

SEQ ID NO: 43002 - DNA, 20 bp, Artificial Sequence
  Synthetic
ctttataggtttagataagg

SEQ ID NO: 43003 - DNA, 20 bp, Artificial Sequence
  Synthetic
tttataggtttagataaggt

SEQ ID NO: 43004 - DNA, 20 bp, Artificial Sequence
  Synthetic
tttacttttagatggctgta

SEQ ID NO: 43005 - DNA, 20 bp, Artificial Sequence
  Synthetic
ttacttttagatggctgtat

SEQ ID NO: 43006 - DNA, 20 bp, Artificial Sequence
  Synthetic
attttcaggagtttgaattt

SEQ ID NO: 43007 - DNA, 20 bp, Artificial Sequence
  Synthetic
aataaacgaggagtattttc

SEQ ID NO: 43008 - DNA, 20 bp, Artificial Sequence
  Synthetic
tttactaaatcaaataaacg

SEQ ID NO: 43009 - DNA, 20 bp, Artificial Sequence
  Synthetic
gtaaagcaaaataaaaagct

SEQ ID NO: 43010 - DNA, 20 bp, Artificial Sequence
  Synthetic
taccttagtagctgacaact

SEQ ID NO: 43011 - DNA, 20 bp, Artificial Sequence
  Synthetic
atccaagttgtcagctacta

SEQ ID NO: 43012 - DNA, 20 bp, Artificial Sequence
  Synthetic
tttttgatatgctactcttg

SEQ ID NO: 43013 - DNA, 20 bp, Artificial Sequence
  Synthetic
catatcaaaaagatagaaga

SEQ ID NO: 43014 - DNA, 20 bp, Artificial Sequence
  Synthetic
aaaagatagaagatggagag

SEQ ID NO: 43015 - DNA, 20 bp, Artificial Sequence
  Synthetic
atggagagtggtaactttac

SEQ ID NO: 43016 - DNA, 20 bp, Artificial Sequence
  Synthetic
tggagagtggtaactttaca

SEQ ID NO: 43017 - DNA, 20 bp, Artificial Sequence
  Synthetic
ggacaaatcatagaacagtc

SEQ ID NO: 43018 - DNA, 20 bp, Artificial Sequence
  Synthetic
tgttttccaggtacaatgac

SEQ ID NO: 43019 - DNA, 20 bp, Artificial Sequence
  Synthetic
tttccaggtacaatgactgg

SEQ ID NO: 43020 - DNA, 20 bp, Artificial Sequence
  Synthetic
ccaccaccagtcattgtacc

SEQ ID NO: 43021 - DNA, 20 bp, Artificial Sequence
  Synthetic
ccaggtacaatgactggtgg

SEQ ID NO: 43022 - DNA, 20 bp, Artificial Sequence
  Synthetic
ggtggaagcaaagtaatgaa

SEQ ID NO: 43023 - DNA, 20 bp, Artificial Sequence
  Synthetic
caaagtaatgaaaggaagaa

SEQ ID NO: 43024 - DNA, 20 bp, Artificial Sequence
  Synthetic
aaagtaatgaaaggaagaat

SEQ ID NO: 43025 - DNA, 20 bp, Artificial Sequence
  Synthetic
agagatttcaataacaagtg

SEQ ID NO: 43026 - DNA, 20 bp, Artificial Sequence
  Synthetic
tattgaaatctctgaagaag

SEQ ID NO: 43027 - DNA, 20 bp, Artificial Sequence
  Synthetic
ttctttgtaggtaaacaaaa

SEQ ID NO: 43028 - DNA, 20 bp, Artificial Sequence
  Synthetic
caagttgtactttctgttct

SEQ ID NO: 43029 - DNA, 20 bp, Artificial Sequence
  Synthetic
aagaaagagtagttaagtta

SEQ ID NO: 43030 - DNA, 20 bp, Artificial Sequence
  Synthetic
ggcatagtgaacgagaaatg

SEQ ID NO: 43031 - DNA, 20 bp, Artificial Sequence
  Synthetic
aaaatttactgcaagcatcc

SEQ ID NO: 43032 - DNA, 20 bp, Artificial Sequence
  Synthetic
atatttgaatgtccaagtta

SEQ ID NO: 43033 - DNA, 20 bp, Artificial Sequence
  Synthetic
tagcttcaagttccttaact

SEQ ID NO: 43034 - DNA, 20 bp, Artificial Sequence
  Synthetic
tttctgcttttttttgtcag

SEQ ID NO: 43035 - DNA, 20 bp, Artificial Sequence
  Synthetic
atttctgcttttttttgtca

SEQ ID NO: 43036 - DNA, 20 bp, Artificial Sequence
  Synthetic
aatttctgcttttttttgtc

SEQ ID NO: 43037 - DNA, 20 bp, Artificial Sequence
  Synthetic
aacgttagtgctttcaaaac

SEQ ID NO: 43038 - DNA, 20 bp, Artificial Sequence
  Synthetic
aatttcagaatatgatgctg

SEQ ID NO: 43039 - DNA, 20 bp, Artificial Sequence
  Synthetic
gatgctgtggctgagaaagc

SEQ ID NO: 43040 - DNA, 20 bp, Artificial Sequence
  Synthetic
agctggtaaagtagaagctg

SEQ ID NO: 43041 - DNA, 20 bp, Artificial Sequence
  Synthetic
atgattattgatttctacga

SEQ ID NO: 43042 - DNA, 20 bp, Artificial Sequence
  Synthetic
aatcaataatcataaactca

SEQ ID NO: 43043 - DNA, 20 bp, Artificial Sequence
  Synthetic
tttatcaagtttgtcttgtt

SEQ ID NO: 43044 - DNA, 20 bp, Artificial Sequence
  Synthetic
ttttatcaagtttgtcttgt

SEQ ID NO: 43045 - DNA, 20 bp, Artificial Sequence
  Synthetic
agcagtcttgattgctactt

SEQ ID NO: 43046 - DNA, 20 bp, Artificial Sequence
  Synthetic
cagcagtcttgattgctact

SEQ ID NO: 43047 - DNA, 20 bp, Artificial Sequence
  Synthetic
tagcaatcaagactgctgac

SEQ ID NO: 43048 - DNA, 20 bp, Artificial Sequence
  Synthetic
cttctttagaaaccttcaaa

SEQ ID NO: 43049 - DNA, 20 bp, Artificial Sequence
  Synthetic
cagagtcttgtgccttttga

SEQ ID NO: 43050 - DNA, 20 bp, Artificial Sequence
  Synthetic
aataaaagatactgagaaag

SEQ ID NO: 43051 - DNA, 20 bp, Artificial Sequence
  Synthetic
aaaagatactgagaaagagg

SEQ ID NO: 43052 - DNA, 20 bp, Artificial Sequence
  Synthetic
gacttttcagctctgctgtt

SEQ ID NO: 43053 - DNA, 20 bp, Artificial Sequence
  Synthetic
agcagagctgaaaagtcttg

SEQ ID NO: 43054 - DNA, 20 bp, Artificial Sequence
  Synthetic
tcttgaggacaaagcagcag

SEQ ID NO: 43055 - DNA, 20 bp, Artificial Sequence
  Synthetic
aaagaatacaaatgctgcag

SEQ ID NO: 43056 - DNA, 20 bp, Artificial Sequence
  Synthetic
ttctttctggatctctggta

SEQ ID NO: 43057 - DNA, 20 bp, Artificial Sequence
  Synthetic
cgatgttctttctggatctc

SEQ ID NO: 43058 - DNA, 20 bp, Artificial Sequence
  Synthetic
gcagattgcgatgttctttc

SEQ ID NO: 43059 - DNA, 20 bp, Artificial Sequence
  Synthetic
ttgaaacttgaacaaataga

SEQ ID NO: 43060 - DNA, 20 bp, Artificial Sequence
  Synthetic
ataattctaaaataaaatat

SEQ ID NO: 43061 - DNA, 20 bp, Artificial Sequence
  Synthetic
aataaaatattggcacaaag

SEQ ID NO: 43062 - DNA, 20 bp, Artificial Sequence
  Synthetic
tcaataggattatcttctat

SEQ ID NO: 43063 - DNA, 20 bp, Artificial Sequence
  Synthetic
taatcctattgaagagattt

SEQ ID NO: 43064 - DNA, 20 bp, Artificial Sequence
  Synthetic
agaaccgaaatctcttcaat

SEQ ID NO: 43065 - DNA, 20 bp, Artificial Sequence
  Synthetic
gatttcggttctaagcccag

SEQ ID NO: 43066 - DNA, 20 bp, Artificial Sequence
  Synthetic
tgatcgcttcaagatcctct

SEQ ID NO: 43067 - DNA, 20 bp, Artificial Sequence
  Synthetic
ttgatcgcttcaagatcctc

SEQ ID NO: 43068 - DNA, 20 bp, Artificial Sequence
  Synthetic
atttgatttgttatagaatc

SEQ ID NO: 43069 - DNA, 20 bp, Artificial Sequence
  Synthetic
aacaaatcaaattgcacttt

SEQ ID NO: 43070 - DNA, 20 bp, Artificial Sequence
  Synthetic
aaattgcacttttggaagcc

SEQ ID NO: 43071 - DNA, 20 bp, Artificial Sequence
  Synthetic
tggtttcatttcatgacacc

SEQ ID NO: 43072 - DNA, 20 bp, Artificial Sequence
  Synthetic
ttggtttcatttcatgacac

SEQ ID NO: 43073 - DNA, 20 bp, Artificial Sequence
  Synthetic
catgaaatgaaaccaaacct

SEQ ID NO: 43074 - DNA, 20 bp, Artificial Sequence
  Synthetic
tctgcgatggcaccgaggtt

SEQ ID NO: 43075 - DNA, 20 bp, Artificial Sequence
  Synthetic
tatactctgcgatggcaccg

SEQ ID NO: 43076 - DNA, 20 bp, Artificial Sequence
  Synthetic
cttctttttatactctgcga

SEQ ID NO: 43077 - DNA, 20 bp, Artificial Sequence
  Synthetic
catcgcagagtataaaaaga

SEQ ID NO: 43078 - DNA, 20 bp, Artificial Sequence
  Synthetic
aggaagaattgtatttgcaa

SEQ ID NO: 43079 - DNA, 20 bp, Artificial Sequence
  Synthetic
ggaagaattgtatttgcaac

SEQ ID NO: 43080 - DNA, 20 bp, Artificial Sequence
  Synthetic
tttgcaacgggtagcagaat

SEQ ID NO: 43081 - DNA, 20 bp, Artificial Sequence
  Synthetic
tgaaagagacagttttagac

SEQ ID NO: 43082 - DNA, 20 bp, Artificial Sequence
  Synthetic
gacaggcatatgaagatctt

SEQ ID NO: 43083 - DNA, 20 bp, Artificial Sequence
  Synthetic
atgaagatcttcggaaacaa

SEQ ID NO: 43084 - DNA, 20 bp, Artificial Sequence
  Synthetic
acaaaggcttaatgaattta

SEQ ID NO: 43085 - DNA, 20 bp, Artificial Sequence
  Synthetic
aggcttaatgaatttatggc

SEQ ID NO: 43086 - DNA, 20 bp, Artificial Sequence
  Synthetic
tataataacaaataaattaa

SEQ ID NO: 43087 - DNA, 20 bp, Artificial Sequence
  Synthetic
aaattaccaaatgcttactt

SEQ ID NO: 43088 - DNA, 20 bp, Artificial Sequence
  Synthetic
aattaccaaatgcttacttt

SEQ ID NO: 43089 - DNA, 20 bp, Artificial Sequence
  Synthetic
taccaaatgcttactttggg

SEQ ID NO: 43090 - DNA, 20 bp, Artificial Sequence
  Synthetic
accaaatgcttactttggga

SEQ ID NO: 43091 - DNA, 20 bp, Artificial Sequence
  Synthetic
cccctcccaaagtaagcatt

SEQ ID NO: 43092 - DNA, 20 bp, Artificial Sequence
  Synthetic
ccaaatgcttactttgggag

SEQ ID NO: 43093 - DNA, 20 bp, Artificial Sequence
  Synthetic
gctgtctacaagctcgagtt

SEQ ID NO: 43094 - DNA, 20 bp, Artificial Sequence
  Synthetic
actcgagcttgtagacagct

SEQ ID NO: 43095 - DNA, 20 bp, Artificial Sequence
  Synthetic
agcttggatcctttctctga

SEQ ID NO: 43096 - DNA, 20 bp, Artificial Sequence
  Synthetic
aacatgattccttcagagaa

SEQ ID NO: 43097 - DNA, 20 bp, Artificial Sequence
  Synthetic
tctctgaaggaatcatgttc

SEQ ID NO: 43098 - DNA, 20 bp, Artificial Sequence
  Synthetic
ttcgaccacctaagaaaagt

SEQ ID NO: 43099 - DNA, 20 bp, Artificial Sequence
  Synthetic
tttttccaacttttcttagg

SEQ ID NO: 43100 - DNA, 20 bp, Artificial Sequence
  Synthetic
atctttttccaacttttctt

SEQ ID NO: 43101 - DNA, 20 bp, Artificial Sequence
  Synthetic
gaaaaagatcttcaaccttt

SEQ ID NO: 43102 - DNA, 20 bp, Artificial Sequence
  Synthetic
aaaaagatcttcaacctttc

SEQ ID NO: 43103 - DNA, 20 bp, Artificial Sequence
  Synthetic
aagatcttcaacctttcggg

SEQ ID NO: 43104 - DNA, 20 bp, Artificial Sequence
  Synthetic
gtgttttctctcctcccgaa

SEQ ID NO: 43105 - DNA, 20 bp, Artificial Sequence
  Synthetic
agagaaaacacttagttcat

SEQ ID NO: 43106 - DNA, 20 bp, Artificial Sequence
  Synthetic
aaaggggagtgggcttgtag

SEQ ID NO: 43107 - DNA, 20 bp, Artificial Sequence
  Synthetic
gcccactcccctttacttca

SEQ ID NO: 43108 - DNA, 20 bp, Artificial Sequence
  Synthetic
tccatgaagtaaaggggagt

SEQ ID NO: 43109 - DNA, 20 bp, Artificial Sequence
  Synthetic
atccatgaagtaaaggggag

SEQ ID NO: 43110 - DNA, 20 bp, Artificial Sequence
  Synthetic
atctcatccatgaagtaaag

SEQ ID NO: 43111 - DNA, 20 bp, Artificial Sequence
  Synthetic
aatctcatccatgaagtaaa

SEQ ID NO: 43112 - DNA, 20 bp, Artificial Sequence
  Synthetic
caatctcatccatgaagtaa

SEQ ID NO: 43113 - DNA, 20 bp, Artificial Sequence
  Synthetic
ggacacatttttaaaatcaa

SEQ ID NO: 43114 - DNA, 20 bp, Artificial Sequence
  Synthetic
tggacacatttttaaaatca

SEQ ID NO: 43115 - DNA, 20 bp, Artificial Sequence
  Synthetic
atatatataaaatgcaacaa

SEQ ID NO: 43116 - DNA, 20 bp, Artificial Sequence
  Synthetic
aaataatatgtttgagattt

SEQ ID NO: 43117 - DNA, 20 bp, Artificial Sequence
  Synthetic
gagatttcggatagacttat

SEQ ID NO: 43118 - DNA, 20 bp, Artificial Sequence
  Synthetic
tcaccgctgagggcaaagga

SEQ ID NO: 43119 - DNA, 20 bp, Artificial Sequence
  Synthetic
caccgctgagggcaaaggaa

SEQ ID NO: 43120 - DNA, 20 bp, Artificial Sequence
  Synthetic
accgctgagggcaaaggaag

SEQ ID NO: 43121 - DNA, 20 bp, Artificial Sequence
  Synthetic
gggcaaaggaaggggtctga

SEQ ID NO: 43122 - DNA, 20 bp, Artificial Sequence
  Synthetic
aaggggtctgaaggccacca

SEQ ID NO: 43123 - DNA, 20 bp, Artificial Sequence
  Synthetic
tgaaggccaccaaggagttc

SEQ ID NO: 43124 - DNA, 20 bp, Artificial Sequence
  Synthetic
gaaggccaccaaggagttct

SEQ ID NO: 43125 - DNA, 20 bp, Artificial Sequence
  Synthetic
tgcagcccagaactccttgg

SEQ ID NO: 43126 - DNA, 20 bp, Artificial Sequence
  Synthetic
atctgcagcccagaactcct

SEQ ID NO: 43127 - DNA, 20 bp, Artificial Sequence
  Synthetic
cagatatcatctttgctgag

SEQ ID NO: 43128 - DNA, 20 bp, Artificial Sequence
  Synthetic
agatatcatctttgctgagc

SEQ ID NO: 43129 - DNA, 20 bp, Artificial Sequence
  Synthetic
tgagcgggcttattccgcag

SEQ ID NO: 43130 - DNA, 20 bp, Artificial Sequence
  Synthetic
attccgcagtggtttttgac

SEQ ID NO: 43131 - DNA, 20 bp, Artificial Sequence
  Synthetic
atacctgtcaaaaaccactg

SEQ ID NO: 43132 - DNA, 20 bp, Artificial Sequence
  Synthetic
gcacacaaaattaacaaggc

SEQ ID NO: 43133 - DNA, 20 bp, Artificial Sequence
  Synthetic
tgtggcacacaaaattaaca

SEQ ID NO: 43134 - DNA, 20 bp, Artificial Sequence
  Synthetic
tgtgccacacctgcttcaag

SEQ ID NO: 43135 - DNA, 20 bp, Artificial Sequence
  Synthetic
cctgcctcttgaagcaggtg

SEQ ID NO: 43136 - DNA, 20 bp, Artificial Sequence
  Synthetic
ccacacctgcttcaagaggc

SEQ ID NO: 43137 - DNA, 20 bp, Artificial Sequence
  Synthetic
cttctcctgcctcttgaagc

SEQ ID NO: 43138 - DNA, 20 bp, Artificial Sequence
  Synthetic
caggagaagctccatcgctg

SEQ ID NO: 43139 - DNA, 20 bp, Artificial Sequence
  Synthetic
aggagaagctccatcgctgt

SEQ ID NO: 43140 - DNA, 20 bp, Artificial Sequence
  Synthetic
acttgcactgcccacagcga

SEQ ID NO: 43141 - DNA, 20 bp, Artificial Sequence
  Synthetic
gcaggtgcggtcgcagtaat

SEQ ID NO: 43142 - DNA, 20 bp, Artificial Sequence
  Synthetic
ggcaggtgcggtcgcagtaa

SEQ ID NO: 43143 - DNA, 20 bp, Artificial Sequence
  Synthetic
ctgcgaccgcacctgccaga

SEQ ID NO: 43144 - DNA, 20 bp, Artificial Sequence
  Synthetic
aagcatccttctggcaggtg

SEQ ID NO: 43145 - DNA, 20 bp, Artificial Sequence
  Synthetic
gcacctgccagaaggatgct

SEQ ID NO: 43146 - DNA, 20 bp, Artificial Sequence
  Synthetic
cagccaagcatccttctggc

SEQ ID NO: 43147 - DNA, 20 bp, Artificial Sequence
  Synthetic
ggttcagccaagcatccttc

SEQ ID NO: 43148 - DNA, 20 bp, Artificial Sequence
  Synthetic
gaaccacaagaatgaatgtt

SEQ ID NO: 43149 - DNA, 20 bp, Artificial Sequence
  Synthetic
tggccgaacattcattcttg

SEQ ID NO: 43150 - DNA, 20 bp, Artificial Sequence
  Synthetic
tgttcggccatcaagagata

SEQ ID NO: 43151 - DNA, 20 bp, Artificial Sequence
  Synthetic
gttcggccatcaagagatat

SEQ ID NO: 43152 - DNA, 20 bp, Artificial Sequence
  Synthetic
ggccatcaagagatatggga

SEQ ID NO: 43153 - DNA, 20 bp, Artificial Sequence
  Synthetic
caccttcccatatctcttga

SEQ ID NO: 43154 - DNA, 20 bp, Artificial Sequence
  Synthetic
aggtgcccaatgagaacatc

SEQ ID NO: 43155 - DNA, 20 bp, Artificial Sequence
  Synthetic
tctcacctgatgttctcatt

SEQ ID NO: 43156 - DNA, 20 bp, Artificial Sequence
  Synthetic
ctctcacctgatgttctcat

SEQ ID NO: 43157 - DNA, 20 bp, Artificial Sequence
  Synthetic
ctgcccttcccacaggctgg

SEQ ID NO: 43158 - DNA, 20 bp, Artificial Sequence
  Synthetic
ggctggcggcgcgcatcatg

SEQ ID NO: 43159 - DNA, 20 bp, Artificial Sequence
  Synthetic
tggcggcgcgcatcatgtgg

SEQ ID NO: 43160 - DNA, 20 bp, Artificial Sequence
  Synthetic
ggcggcgcgcatcatgtggc

SEQ ID NO: 43161 - DNA, 20 bp, Artificial Sequence
  Synthetic
ggcgcgcatcatgtggcggg

SEQ ID NO: 43162 - DNA, 20 bp, Artificial Sequence
  Synthetic
atgtggcgggtggagagaga

SEQ ID NO: 43163 - DNA, 20 bp, Artificial Sequence
  Synthetic
cgggtggagagagaaggcac

SEQ ID NO: 43164 - DNA, 20 bp, Artificial Sequence
  Synthetic
gggtggagagagaaggcacc

SEQ ID NO: 43165 - DNA, 20 bp, Artificial Sequence
  Synthetic
gagagaaggcaccgggctca

SEQ ID NO: 43166 - DNA, 20 bp, Artificial Sequence
  Synthetic
agaaggcaccgggctcacgg

SEQ ID NO: 43167 - DNA, 20 bp, Artificial Sequence
  Synthetic
gaaggcaccgggctcacgga

SEQ ID NO: 43168 - DNA, 20 bp, Artificial Sequence
  Synthetic
caggcagccctccgtgagcc

SEQ ID NO: 43169 - DNA, 20 bp, Artificial Sequence
  Synthetic
cgggctcacggagggctgcc

SEQ ID NO: 43170 - DNA, 20 bp, Artificial Sequence
  Synthetic
ggagggctgcctggtgtccg

SEQ ID NO: 43171 - DNA, 20 bp, Artificial Sequence
  Synthetic
gcaagtcgtccacggacacc

SEQ ID NO: 43172 - DNA, 20 bp, Artificial Sequence
  Synthetic
gtggttctgcaagtcgtcca

SEQ ID NO: 43173 - DNA, 20 bp, Artificial Sequence
  Synthetic
ggacgacttgcagaaccacg

SEQ ID NO: 43174 - DNA, 20 bp, Artificial Sequence
  Synthetic
cagaaccacgtggagcactt

SEQ ID NO: 43175 - DNA, 20 bp, Artificial Sequence
  Synthetic
agaaccacgtggagcacttt

SEQ ID NO: 43176 - DNA, 20 bp, Artificial Sequence
  Synthetic
gaaccacgtggagcactttg

SEQ ID NO: 43177 - DNA, 20 bp, Artificial Sequence
  Synthetic
cctccccaaagtgctccacg

SEQ ID NO: 43178 - DNA, 20 bp, Artificial Sequence
  Synthetic
ccacgtggagcactttgggg

SEQ ID NO: 43179 - DNA, 20 bp, Artificial Sequence
  Synthetic
cgtggagcactttggggagg

SEQ ID NO: 43180 - DNA, 20 bp, Artificial Sequence
  Synthetic
ctttggggaggaggagcaga

SEQ ID NO: 43181 - DNA, 20 bp, Artificial Sequence
  Synthetic
aggaggagcagaaggacctg

SEQ ID NO: 43182 - DNA, 20 bp, Artificial Sequence
  Synthetic
ggaggagcagaaggacctgc

SEQ ID NO: 43183 - DNA, 20 bp, Artificial Sequence
  Synthetic
ggagcagaaggacctgcggg

SEQ ID NO: 43184 - DNA, 20 bp, Artificial Sequence
  Synthetic
gaaggacctgcgggtggacg

SEQ ID NO: 43185 - DNA, 20 bp, Artificial Sequence
  Synthetic
atgtgtccacgtccacccgc

SEQ ID NO: 43186 - DNA, 20 bp, Artificial Sequence
  Synthetic
tggacacattcttgcagtac

SEQ ID NO: 43187 - DNA, 20 bp, Artificial Sequence
  Synthetic
ctgaactgctggctctgcgg

SEQ ID NO: 43188 - DNA, 20 bp, Artificial Sequence
  Synthetic
atgctgaactgctggctctg

SEQ ID NO: 43189 - DNA, 20 bp, Artificial Sequence
  Synthetic
tgtactgcatgctgaactgc

SEQ ID NO: 43190 - DNA, 20 bp, Artificial Sequence
  Synthetic
cagtacatctcgcacatctt

SEQ ID NO: 43191 - DNA, 20 bp, Artificial Sequence
  Synthetic
catctcgcacatcttcggag

SEQ ID NO: 43192 - DNA, 20 bp, Artificial Sequence
  Synthetic
tcgcacatcttcggagtggt

SEQ ID NO: 43193 - DNA, 20 bp, Artificial Sequence
  Synthetic
cctgggtagattaactgcaa

SEQ ID NO: 43194 - DNA, 20 bp, Artificial Sequence
  Synthetic
tttactctcagtgatcagag

SEQ ID NO: 43195 - DNA, 20 bp, Artificial Sequence
  Synthetic
cagtgatcagagaggcctgc

SEQ ID NO: 43196 - DNA, 20 bp, Artificial Sequence
  Synthetic
tcagagaggcctgcaggccg

SEQ ID NO: 43197 - DNA, 20 bp, Artificial Sequence
  Synthetic
cagagaggcctgcaggccgt

SEQ ID NO: 43198 - DNA, 20 bp, Artificial Sequence
  Synthetic
ggcctgcaggccgtgggcgt

SEQ ID NO: 43199 - DNA, 20 bp, Artificial Sequence
  Synthetic
tgcctacgcccacggcctgc

SEQ ID NO: 43200 - DNA, 20 bp, Artificial Sequence
  Synthetic
ggggaagatgcctacgccca

SEQ ID NO: 43201 - DNA, 20 bp, Artificial Sequence
  Synthetic
cgtaggcatcttccccaacc

SEQ ID NO: 43202 - DNA, 20 bp, Artificial Sequence
  Synthetic
gtaggcatcttccccaacct

SEQ ID NO: 43203 - DNA, 20 bp, Artificial Sequence
  Synthetic
catcttccccaacctgggcc

SEQ ID NO: 43204 - DNA, 20 bp, Artificial Sequence
  Synthetic
ggttcaccaggcccaggttg

SEQ ID NO: 43205 - DNA, 20 bp, Artificial Sequence
  Synthetic
tggttcaccaggcccaggtt

SEQ ID NO: 43206 - DNA, 20 bp, Artificial Sequence
  Synthetic
atggttcaccaggcccaggt

SEQ ID NO: 43207 - DNA, 20 bp, Artificial Sequence
  Synthetic
agtcatggttcaccaggccc

SEQ ID NO: 43208 - DNA, 20 bp, Artificial Sequence
  Synthetic
gcctggtgaaccatgactgt

SEQ ID NO: 43209 - DNA, 20 bp, Artificial Sequence
  Synthetic
gccaacagtcatggttcacc

SEQ ID NO: 43210 - DNA, 20 bp, Artificial Sequence
  Synthetic
tacagttgggccaacagtca

SEQ ID NO: 43211 - DNA, 20 bp, Artificial Sequence
  Synthetic
ttaaatatgacagtacagtt

SEQ ID NO: 43212 - DNA, 20 bp, Artificial Sequence
  Synthetic
gttaaatatgacagtacagt

SEQ ID NO: 43213 - DNA, 20 bp, Artificial Sequence
  Synthetic
tgtactgtcatatttaacaa

SEQ ID NO: 43214 - DNA, 20 bp, Artificial Sequence
  Synthetic
tgttttgtctttcagtcatg

SEQ ID NO: 43215 - DNA, 20 bp, Artificial Sequence
  Synthetic
cctcatctgggtatgaaaca

SEQ ID NO: 43216 - DNA, 20 bp, Artificial Sequence
  Synthetic
ccatgtttcatacccagatg

SEQ ID NO: 43217 - DNA, 20 bp, Artificial Sequence
  Synthetic
tgtttcatacccagatgagg

SEQ ID NO: 43218 - DNA, 20 bp, Artificial Sequence
  Synthetic
gtttcatacccagatgaggt

SEQ ID NO: 43219 - DNA, 20 bp, Artificial Sequence
  Synthetic
aggactgacccacctcatct

SEQ ID NO: 43220 - DNA, 20 bp, Artificial Sequence
  Synthetic
aaggactgacccacctcatc

SEQ ID NO: 43221 - DNA, 20 bp, Artificial Sequence
  Synthetic
cctgcttcagaattgagctc

SEQ ID NO: 43222 - DNA, 20 bp, Artificial Sequence
  Synthetic
ctgcttcagaattgagctcc

SEQ ID NO: 43223 - DNA, 20 bp, Artificial Sequence
  Synthetic
agaattgagctccgggccct

SEQ ID NO: 43224 - DNA, 20 bp, Artificial Sequence
  Synthetic
ctgagatcttgcctagggcc

SEQ ID NO: 43225 - DNA, 20 bp, Artificial Sequence
  Synthetic
gccctaggcaagatctcaga

SEQ ID NO: 43226 - DNA, 20 bp, Artificial Sequence
  Synthetic
tccttctgagatcttgccta

SEQ ID NO: 43227 - DNA, 20 bp, Artificial Sequence
  Synthetic
ctccttctgagatcttgcct

SEQ ID NO: 43228 - DNA, 20 bp, Artificial Sequence
  Synthetic
aggcaagatctcagaaggag

SEQ ID NO: 43229 - DNA, 20 bp, Artificial Sequence
  Synthetic
tctgcagcccgggcaaaggc

SEQ ID NO: 43230 - DNA, 20 bp, Artificial Sequence
  Synthetic
ctgcagcccgggcaaaggcc

SEQ ID NO: 43231 - DNA, 20 bp, Artificial Sequence
  Synthetic
tgcagcccgggcaaaggccg

SEQ ID NO: 43232 - DNA, 20 bp, Artificial Sequence
  Synthetic
gcagcccgggcaaaggccgg

SEQ ID NO: 43233 - DNA, 20 bp, Artificial Sequence
  Synthetic
cgggcaaaggccgggggctg

SEQ ID NO: 43234 - DNA, 20 bp, Artificial Sequence
  Synthetic
gggcaaaggccgggggctgc

SEQ ID NO: 43235 - DNA, 20 bp, Artificial Sequence
  Synthetic
gctgcagagcccgcagcccc

SEQ ID NO: 43236 - DNA, 20 bp, Artificial Sequence
  Synthetic
gcgggctctgcagcccttcc

SEQ ID NO: 43237 - DNA, 20 bp, Artificial Sequence
  Synthetic
ggctctgcagcccttccagg

SEQ ID NO: 43238 - DNA, 20 bp, Artificial Sequence
  Synthetic
gctctgcagcccttccaggt

SEQ ID NO: 43239 - DNA, 20 bp, Artificial Sequence
  Synthetic
ctctgcagcccttccaggtg

SEQ ID NO: 43240 - DNA, 20 bp, Artificial Sequence
  Synthetic
tctgcagcccttccaggtgg

SEQ ID NO: 43241 - DNA, 20 bp, Artificial Sequence
  Synthetic
agcaagtcccccacctggaa

SEQ ID NO: 43242 - DNA, 20 bp, Artificial Sequence
  Synthetic
cagcaagtcccccacctgga

SEQ ID NO: 43243 - DNA, 20 bp, Artificial Sequence
  Synthetic
agaacagcaagtcccccacc

SEQ ID NO: 43244 - DNA, 20 bp, Artificial Sequence
  Synthetic
ggacttgctgttctcctgcc

SEQ ID NO: 43245 - DNA, 20 bp, Artificial Sequence
  Synthetic
cacgtaggcataggccgggc

SEQ ID NO: 43246 - DNA, 20 bp, Artificial Sequence
  Synthetic
tgagcacgtaggcataggcc

SEQ ID NO: 43247 - DNA, 20 bp, Artificial Sequence
  Synthetic
gtgagcacgtaggcataggc

SEQ ID NO: 43248 - DNA, 20 bp, Artificial Sequence
  Synthetic
ggcctatgcctacgtgctca

SEQ ID NO: 43249 - DNA, 20 bp, Artificial Sequence
  Synthetic
gaccgtgagcacgtaggcat

SEQ ID NO: 43250 - DNA, 20 bp, Artificial Sequence
  Synthetic
ctcgttgaccgtgagcacgt

SEQ ID NO: 43251 - DNA, 20 bp, Artificial Sequence
  Synthetic
acgtgctcacggtcaacgag

SEQ ID NO: 43252 - DNA, 20 bp, Artificial Sequence
  Synthetic
cgtgctcacggtcaacgagc

SEQ ID NO: 43253 - DNA, 20 bp, Artificial Sequence
  Synthetic
gtgctcacggtcaacgagcg

SEQ ID NO: 43254 - DNA, 20 bp, Artificial Sequence
  Synthetic
tggtgaagcagtactcgcag

SEQ ID NO: 43255 - DNA, 20 bp, Artificial Sequence
  Synthetic
actgcgagtactgcttcacc

SEQ ID NO: 43256 - DNA, 20 bp, Artificial Sequence
  Synthetic
cgagtactgcttcaccaggt

SEQ ID NO: 43257 - DNA, 20 bp, Artificial Sequence
  Synthetic
tttctgtttttaaggaaaga

SEQ ID NO: 43258 - DNA, 20 bp, Artificial Sequence
  Synthetic
aaagaaggattgtccaaatg

SEQ ID NO: 43259 - DNA, 20 bp, Artificial Sequence
  Synthetic
ctgcttgcatcttccacatt

SEQ ID NO: 43260 - DNA, 20 bp, Artificial Sequence
  Synthetic
caaatgtggaagatgcaagc

SEQ ID NO: 43261 - DNA, 20 bp, Artificial Sequence
  Synthetic
gcaggcattttactgcaatg

SEQ ID NO: 43262 - DNA, 20 bp, Artificial Sequence
  Synthetic
ttactgcaatgtggagtgtc

SEQ ID NO: 43263 - DNA, 20 bp, Artificial Sequence
  Synthetic
tgcaatgtggagtgtcaggt

SEQ ID NO: 43264 - DNA, 20 bp, Artificial Sequence
  Synthetic
aatcttcccagaaagaagat

SEQ ID NO: 43265 - DNA, 20 bp, Artificial Sequence
  Synthetic
gcatgggccaatcttctttc

SEQ ID NO: 43266 - DNA, 20 bp, Artificial Sequence
  Synthetic
agattggcccatgcacaagc

SEQ ID NO: 43267 - DNA, 20 bp, Artificial Sequence
  Synthetic
gaacattccagcttgtgcat

SEQ ID NO: 43268 - DNA, 20 bp, Artificial Sequence
  Synthetic
agaacattccagcttgtgca

SEQ ID NO: 43269 - DNA, 20 bp, Artificial Sequence
  Synthetic
caagctggaatgttctccca

SEQ ID NO: 43270 - DNA, 20 bp, Artificial Sequence
  Synthetic
tgttctcccatggttgtttt

SEQ ID NO: 43271 - DNA, 20 bp, Artificial Sequence
  Synthetic
gttctcccatggttgttttt

SEQ ID NO: 43272 - DNA, 20 bp, Artificial Sequence
  Synthetic
ttctcccatggttgtttttg

SEQ ID NO: 43273 - DNA, 20 bp, Artificial Sequence
  Synthetic
ttttccccaaaaacaaccat

SEQ ID NO: 43274 - DNA, 20 bp, Artificial Sequence
  Synthetic
gttttccccaaaaacaacca

SEQ ID NO: 43275 - DNA, 20 bp, Artificial Sequence
  Synthetic
tggttgtttttggggaaaac

SEQ ID NO: 43276 - DNA, 20 bp, Artificial Sequence
  Synthetic
tggggaaaactggaatccct

SEQ ID NO: 43277 - DNA, 20 bp, Artificial Sequence
  Synthetic
gttagtcttacagtctccga

SEQ ID NO: 43278 - DNA, 20 bp, Artificial Sequence
  Synthetic
tgttagtcttacagtctccg

SEQ ID NO: 43279 - DNA, 20 bp, Artificial Sequence
  Synthetic
agactgtaagactaacagca

SEQ ID NO: 43280 - DNA, 20 bp, Artificial Sequence
  Synthetic
aagactaacagcaaggattc

SEQ ID NO: 43281 - DNA, 20 bp, Artificial Sequence
  Synthetic
agcaaggattctggccaaac

SEQ ID NO: 43282 - DNA, 20 bp, Artificial Sequence
  Synthetic
gtcccatttcctcacctgtt

SEQ ID NO: 43283 - DNA, 20 bp, Artificial Sequence
  Synthetic
ccgaaggtgttctctctggg

SEQ ID NO: 43284 - DNA, 20 bp, Artificial Sequence
  Synthetic
ccacccagagagaacacctt

SEQ ID NO: 43285 - DNA, 20 bp, Artificial Sequence
  Synthetic
tttccgaaggtgttctctct

SEQ ID NO: 43286 - DNA, 20 bp, Artificial Sequence
  Synthetic
ttttccgaaggtgttctctc

SEQ ID NO: 43287 - DNA, 20 bp, Artificial Sequence
  Synthetic
acagctaacaatttttccga

SEQ ID NO: 43288 - DNA, 20 bp, Artificial Sequence
  Synthetic
ggaaaaattgttagctgtga

SEQ ID NO: 43289 - DNA, 20 bp, Artificial Sequence
  Synthetic
taagttagacaatgagaaga

SEQ ID NO: 43290 - DNA, 20 bp, Artificial Sequence
  Synthetic
gatgcttggagtaaaagtga

SEQ ID NO: 43291 - DNA, 20 bp, Artificial Sequence
  Synthetic
cacttttactccaagcatct

SEQ ID NO: 43292 - DNA, 20 bp, Artificial Sequence
  Synthetic
gtcagggaatccgagatgct

SEQ ID NO: 43293 - DNA, 20 bp, Artificial Sequence
  Synthetic
ctacgaggctatcattgtca

SEQ ID NO: 43294 - DNA, 20 bp, Artificial Sequence
  Synthetic
actacgaggctatcattgtc

SEQ ID NO: 43295 - DNA, 20 bp, Artificial Sequence
  Synthetic
cctgtgcaaagagtactacg

SEQ ID NO: 43296 - DNA, 20 bp, Artificial Sequence
  Synthetic
cctcgtagtactctttgcac

SEQ ID NO: 43297 - DNA, 20 bp, Artificial Sequence
  Synthetic
ttgctgcaggttaactgtaa

SEQ ID NO: 43298 - DNA, 20 bp, Artificial Sequence
  Synthetic
agatgaagaactttctcatt

SEQ ID NO: 43299 - DNA, 20 bp, Artificial Sequence
  Synthetic
gatgaagaactttctcattt

SEQ ID NO: 43300 - DNA, 20 bp, Artificial Sequence
  Synthetic
atcagcgatatttcctgagt

SEQ ID NO: 43301 - DNA, 20 bp, Artificial Sequence
  Synthetic
tgtaggtcacaatgacattg

SEQ ID NO: 43302 - DNA, 20 bp, Artificial Sequence
  Synthetic
ttgtaggtcacaatgacatt

SEQ ID NO: 43303 - DNA, 20 bp, Artificial Sequence
  Synthetic
tttgtaggtcacaatgacat

SEQ ID NO: 43304 - DNA, 20 bp, Artificial Sequence
  Synthetic
aatgtcattgtgacctacaa

SEQ ID NO: 43305 - DNA, 20 bp, Artificial Sequence
  Synthetic
atgtcattgtgacctacaaa

SEQ ID NO: 43306 - DNA, 20 bp, Artificial Sequence
  Synthetic
tgtgacctacaaagggaccc

SEQ ID NO: 43307 - DNA, 20 bp, Artificial Sequence
  Synthetic
ttctgccagggtccctttgt

SEQ ID NO: 43308 - DNA, 20 bp, Artificial Sequence
  Synthetic
tacagctctgacttctgcca

SEQ ID NO: 43309 - DNA, 20 bp, Artificial Sequence
  Synthetic
gtacagctctgacttctgcc

SEQ ID NO: 43310 - DNA, 20 bp, Artificial Sequence
  Synthetic
ggcagaagtcagagctgtac

SEQ ID NO: 43311 - DNA, 20 bp, Artificial Sequence
  Synthetic
agctgtacaggaaatcaagc

SEQ ID NO: 43312 - DNA, 20 bp, Artificial Sequence
  Synthetic
gctgtacaggaaatcaagcc

SEQ ID NO: 43313 - DNA, 20 bp, Artificial Sequence
  Synthetic
acaggaaatcaagccgggag

SEQ ID NO: 43314 - DNA, 20 bp, Artificial Sequence
  Synthetic
ggaaatcaagccgggagagg

SEQ ID NO: 43315 - DNA, 20 bp, Artificial Sequence
  Synthetic
catgaactcacctcctctcc

SEQ ID NO: 43316 - DNA, 20 bp, Artificial Sequence
  Synthetic
gtacaggagatcaatatagc

SEQ ID NO: 43317 - DNA, 20 bp, Artificial Sequence
  Synthetic
gcaaccgccaagaggggaaa

SEQ ID NO: 43318 - DNA, 20 bp, Artificial Sequence
  Synthetic
caaccgccaagaggggaaac

SEQ ID NO: 43319 - DNA, 20 bp, Artificial Sequence
  Synthetic
gccgtgaccccgctgcgccc

SEQ ID NO: 43320 - DNA, 20 bp, Artificial Sequence
  Synthetic
tccggggcgcagcggggtca

SEQ ID NO: 43321 - DNA, 20 bp, Artificial Sequence
  Synthetic
tagctctccggggcgcagcg

SEQ ID NO: 43322 - DNA, 20 bp, Artificial Sequence
  Synthetic
gtagctctccggggcgcagc

SEQ ID NO: 43323 - DNA, 20 bp, Artificial Sequence
  Synthetic
agtagctctccggggcgcag

SEQ ID NO: 43324 - DNA, 20 bp, Artificial Sequence
  Synthetic
agcggaagagtagctctccg

SEQ ID NO: 43325 - DNA, 20 bp, Artificial Sequence
  Synthetic
gagcggaagagtagctctcc

SEQ ID NO: 43326 - DNA, 20 bp, Artificial Sequence
  Synthetic
cgagcggaagagtagctctc

SEQ ID NO: 43327 - DNA, 20 bp, Artificial Sequence
  Synthetic
cggagagctactcttccgct

SEQ ID NO: 43328 - DNA, 20 bp, Artificial Sequence
  Synthetic
actcttccgctcggatccct

SEQ ID NO: 43329 - DNA, 20 bp, Artificial Sequence
  Synthetic
tgtacgccaagggatccgag

SEQ ID NO: 43330 - DNA, 20 bp, Artificial Sequence
  Synthetic
ctcggatcccttggcgtaca

SEQ ID NO: 43331 - DNA, 20 bp, Artificial Sequence
  Synthetic
ttgcacaccgtgtacgccaa

SEQ ID NO: 43332 - DNA, 20 bp, Artificial Sequence
  Synthetic
cttgcacaccgtgtacgcca

SEQ ID NO: 43333 - DNA, 20 bp, Artificial Sequence
  Synthetic
cttggcgtacacggtgtgca

SEQ ID NO: 43334 - DNA, 20 bp, Artificial Sequence
  Synthetic
ttggcgtacacggtgtgcaa

SEQ ID NO: 43335 - DNA, 20 bp, Artificial Sequence
  Synthetic
tggcgtacacggtgtgcaag

SEQ ID NO: 43336 - DNA, 20 bp, Artificial Sequence
  Synthetic
acggtgtgcaaggggagtcg

SEQ ID NO: 43337 - DNA, 20 bp, Artificial Sequence
  Synthetic
gtctgcgaccgctgccttct

SEQ ID NO: 43338 - DNA, 20 bp, Artificial Sequence
  Synthetic
tctgcgaccgctgccttctc

SEQ ID NO: 43339 - DNA, 20 bp, Artificial Sequence
  Synthetic
ttacgcacccgagaaggcag

SEQ ID NO: 43340 - DNA, 20 bp, Artificial Sequence
  Synthetic
cgctccttacgcacccgaga

SEQ ID NO: 43341 - DNA, 20 bp, Artificial Sequence
  Synthetic
cactacagtatttggcgacg

SEQ ID NO: 43342 - DNA, 20 bp, Artificial Sequence
  Synthetic
acacttagcactacagtatt

SEQ ID NO: 43343 - DNA, 20 bp, Artificial Sequence
  Synthetic
atactgtagtgctaagtgtc

SEQ ID NO: 43344 - DNA, 20 bp, Artificial Sequence
  Synthetic
tgttttaatagaaaaaagct

SEQ ID NO: 43345 - DNA, 20 bp, Artificial Sequence
  Synthetic
aagcttggccagaccacaag

SEQ ID NO: 43346 - DNA, 20 bp, Artificial Sequence
  Synthetic
agcttggccagaccacaagc

SEQ ID NO: 43347 - DNA, 20 bp, Artificial Sequence
  Synthetic
ttgcattcccgcttgtggtc

SEQ ID NO: 43348 - DNA, 20 bp, Artificial Sequence
  Synthetic
ggcatttgcattcccgcttg

SEQ ID NO: 43349 - DNA, 20 bp, Artificial Sequence
  Synthetic
atctgggtttgcagctttta

SEQ ID NO: 43350 - DNA, 20 bp, Artificial Sequence
  Synthetic
acggagtctggaggatatct

SEQ ID NO: 43351 - DNA, 20 bp, Artificial Sequence
  Synthetic
aacggagtctggaggatatc

SEQ ID NO: 43352 - DNA, 20 bp, Artificial Sequence
  Synthetic
agaagtcgaacggagtctgg

SEQ ID NO: 43353 - DNA, 20 bp, Artificial Sequence
  Synthetic
ccaagaagtcgaacggagtc

SEQ ID NO: 43354 - DNA, 20 bp, Artificial Sequence
  Synthetic
ccagactccgttcgacttct

SEQ ID NO: 43355 - DNA, 20 bp, Artificial Sequence
  Synthetic
aactctgccaagaagtcgaa

SEQ ID NO: 43356 - DNA, 20 bp, Artificial Sequence
  Synthetic
ccttttccttcacagatgga

SEQ ID NO: 43357 - DNA, 20 bp, Artificial Sequence
  Synthetic
taaagcttctctgattctga

SEQ ID NO: 43358 - DNA, 20 bp, Artificial Sequence
  Synthetic
gctttactcattttatgatc

SEQ ID NO: 43359 - DNA, 20 bp, Artificial Sequence
  Synthetic
actgactgaagataagaaag

SEQ ID NO: 43360 - DNA, 20 bp, Artificial Sequence
  Synthetic
ctgactgaagataagaaaga

SEQ ID NO: 43361 - DNA, 20 bp, Artificial Sequence
  Synthetic
aagataagaaagagggcctc

SEQ ID NO: 43362 - DNA, 20 bp, Artificial Sequence
  Synthetic
atgtcattacgagttgcctg

SEQ ID NO: 43363 - DNA, 20 bp, Artificial Sequence
  Synthetic
tttcatgagagaagaaatac

SEQ ID NO: 43364 - DNA, 20 bp, Artificial Sequence
  Synthetic
aaaggcaggtggcagctgag

SEQ ID NO: 43365 - DNA, 20 bp, Artificial Sequence
  Synthetic
tcaaaaaggtcaaaggcagg

SEQ ID NO: 43366 - DNA, 20 bp, Artificial Sequence
  Synthetic
gcttcaaaaaggtcaaaggc

SEQ ID NO: 43367 - DNA, 20 bp, Artificial Sequence
  Synthetic
aaaggcttcaaaaaggtcaa

SEQ ID NO: 43368 - DNA, 20 bp, Artificial Sequence
  Synthetic
cttttgcaaaggcttcaaaa

SEQ ID NO: 43369 - DNA, 20 bp, Artificial Sequence
  Synthetic
cttaacacttacttttgcaa

SEQ ID NO: 43370 - DNA, 20 bp, Artificial Sequence
  Synthetic
ctctttcaccatctgtaatg

SEQ ID NO: 43371 - DNA, 20 bp, Artificial Sequence
  Synthetic
ctgcatctccgcattacaga

SEQ ID NO: 43372 - DNA, 20 bp, Artificial Sequence
  Synthetic
catctgtaatgcggagatgc

SEQ ID NO: 43373 - DNA, 20 bp, Artificial Sequence
  Synthetic
aatgcggagatgcaggaagt

SEQ ID NO: 43374 - DNA, 20 bp, Artificial Sequence
  Synthetic
gagatgcaggaagttggtgt

SEQ ID NO: 43375 - DNA, 20 bp, Artificial Sequence
  Synthetic
ttggtgttggcctatatccc

SEQ ID NO: 43376 - DNA, 20 bp, Artificial Sequence
  Synthetic
atacaccatacctgggatat

SEQ ID NO: 43377 - DNA, 20 bp, Artificial Sequence
  Synthetic
gtgattgagcaaagagatac

SEQ ID NO: 43378 - DNA, 20 bp, Artificial Sequence
  Synthetic
tgaacacaatcgaacagttg

SEQ ID NO: 43379 - DNA, 20 bp, Artificial Sequence
  Synthetic
ttgaacacaatcgaacagtt

SEQ ID NO: 43380 - DNA, 20 bp, Artificial Sequence
  Synthetic
attgaacacaatcgaacagt

SEQ ID NO: 43381 - DNA, 20 bp, Artificial Sequence
  Synthetic
aactgttcgattgtgttcaa

SEQ ID NO: 43382 - DNA, 20 bp, Artificial Sequence
  Synthetic
actgttcgattgtgttcaat

SEQ ID NO: 43383 - DNA, 20 bp, Artificial Sequence
  Synthetic
actgctcgcagtaagaggtg

SEQ ID NO: 43384 - DNA, 20 bp, Artificial Sequence
  Synthetic
gactgctcgcagtaagaggt

SEQ ID NO: 43385 - DNA, 20 bp, Artificial Sequence
  Synthetic
ggactgctcgcagtaagagg

SEQ ID NO: 43386 - DNA, 20 bp, Artificial Sequence
  Synthetic
ctcggactgctcgcagtaag

SEQ ID NO: 43387 - DNA, 20 bp, Artificial Sequence
  Synthetic
gcgagcagtccgagacatcg

SEQ ID NO: 43388 - DNA, 20 bp, Artificial Sequence
  Synthetic
agcagtccgagacatcgagg

SEQ ID NO: 43389 - DNA, 20 bp, Artificial Sequence
  Synthetic
gcagtccgagacatcgaggt

SEQ ID NO: 43390 - DNA, 20 bp, Artificial Sequence
  Synthetic
cctctcccacctcgatgtct

SEQ ID NO: 43391 - DNA, 20 bp, Artificial Sequence
  Synthetic
ccgagacatcgaggtgggag

SEQ ID NO: 43392 - DNA, 20 bp, Artificial Sequence
  Synthetic
agacatcgaggtgggagagg

SEQ ID NO: 43393 - DNA, 20 bp, Artificial Sequence
  Synthetic
acagctcaccatctgctacc

SEQ ID NO: 43394 - DNA, 20 bp, Artificial Sequence
  Synthetic
cagcatatccaggtagcaga

SEQ ID NO: 43395 - DNA, 20 bp, Artificial Sequence
  Synthetic
gccacaaaagatattctccc

SEQ ID NO: 43396 - DNA, 20 bp, Artificial Sequence
  Synthetic
tcctgggagaatatcttttg

SEQ ID NO: 43397 - DNA, 20 bp, Artificial Sequence
  Synthetic
tattctcccaggagagctcc

SEQ ID NO: 43398 - DNA, 20 bp, Artificial Sequence
  Synthetic
cctgcaccaggagctctcct

SEQ ID NO: 43399 - DNA, 20 bp, Artificial Sequence
  Synthetic
cccaggagagctcctggtgc

SEQ ID NO: 43400 - DNA, 20 bp, Artificial Sequence
  Synthetic
tcctgcaccaggagctctcc

SEQ ID NO: 43401 - DNA, 20 bp, Artificial Sequence
  Synthetic
aggagagctcctggtgcagg

SEQ ID NO: 43402 - DNA, 20 bp, Artificial Sequence
  Synthetic
caaaagcatcctcctgcacc

SEQ ID NO: 43403 - DNA, 20 bp, Artificial Sequence
  Synthetic
tttgtgagtgttctcaaccc

SEQ ID NO: 43404 - DNA, 20 bp, Artificial Sequence
  Synthetic
gcggtggtggcagttctcct

SEQ ID NO: 43405 - DNA, 20 bp, Artificial Sequence
  Synthetic
tgcggtggtggcagttctcc

SEQ ID NO: 43406 - DNA, 20 bp, Artificial Sequence
  Synthetic
gaactgccaccaccgcatca

SEQ ID NO: 43407 - DNA, 20 bp, Artificial Sequence
  Synthetic
tctaggccgtgatgcggtgg

SEQ ID NO: 43408 - DNA, 20 bp, Artificial Sequence
  Synthetic
ctgtctaggccgtgatgcgg

SEQ ID NO: 43409 - DNA, 20 bp, Artificial Sequence
  Synthetic
ttgctgtctaggccgtgatg

SEQ ID NO: 43410 - DNA, 20 bp, Artificial Sequence
  Synthetic
atcacggcctagacagcaaa

SEQ ID NO: 43411 - DNA, 20 bp, Artificial Sequence
  Synthetic
tcacggcctagacagcaaat

SEQ ID NO: 43412 - DNA, 20 bp, Artificial Sequence
  Synthetic
tggtgtcccatttgctgtct

SEQ ID NO: 43413 - DNA, 20 bp, Artificial Sequence
  Synthetic
tgggacaccagagtcaccaa

SEQ ID NO: 43414 - DNA, 20 bp, Artificial Sequence
  Synthetic
gggacaccagagtcaccaat

SEQ ID NO: 43415 - DNA, 20 bp, Artificial Sequence
  Synthetic
ggacaccagagtcaccaatg

SEQ ID NO: 43416 - DNA, 20 bp, Artificial Sequence
  Synthetic
gaggtccccattggtgactc

SEQ ID NO: 43417 - DNA, 20 bp, Artificial Sequence
  Synthetic
gtgacaatagaggtccccat

SEQ ID NO: 43418 - DNA, 20 bp, Artificial Sequence
  Synthetic
tcaaacatcggtgacaatag

SEQ ID NO: 43419 - DNA, 20 bp, Artificial Sequence
  Synthetic
ccaaagtgtgcttcaaacat

SEQ ID NO: 43420 - DNA, 20 bp, Artificial Sequence
  Synthetic
ccgatgtttgaagcacactt

SEQ ID NO: 43421 - DNA, 20 bp, Artificial Sequence
  Synthetic
ttggccacagttccgtgtga

SEQ ID NO: 43422 - DNA, 20 bp, Artificial Sequence
  Synthetic
gcatccgtcacacggaactg

SEQ ID NO: 43423 - DNA, 20 bp, Artificial Sequence
  Synthetic
gcataactgcatccgtcaca

SEQ ID NO: 43424 - DNA, 20 bp, Artificial Sequence
  Synthetic
ttatgccaagtattgcagcc

SEQ ID NO: 43425 - DNA, 20 bp, Artificial Sequence
  Synthetic
acactcctggctgcaatact

SEQ ID NO: 43426 - DNA, 20 bp, Artificial Sequence
  Synthetic
cagccaggagtgtttgcagc

SEQ ID NO: 43427 - DNA, 20 bp, Artificial Sequence
  Synthetic
aggcctgctgcaaacactcc

SEQ ID NO: 43428 - DNA, 20 bp, Artificial Sequence
  Synthetic
aggagtgtttgcagcaggcc

SEQ ID NO: 43429 - DNA, 20 bp, Artificial Sequence
  Synthetic
ggagtgtttgcagcaggcct

SEQ ID NO: 43430 - DNA, 20 bp, Artificial Sequence
  Synthetic
aggcctgggagctctaccac

SEQ ID NO: 43431 - DNA, 20 bp, Artificial Sequence
  Synthetic
tgtcctgtggtagagctccc

SEQ ID NO: 43432 - DNA, 20 bp, Artificial Sequence
  Synthetic
ccagaggacattctgtcctg

SEQ ID NO: 43433 - DNA, 20 bp, Artificial Sequence
  Synthetic
ccacaggacagaatgtcctc

SEQ ID NO: 43434 - DNA, 20 bp, Artificial Sequence
  Synthetic
cacaggacagaatgtcctct

SEQ ID NO: 43435 - DNA, 20 bp, Artificial Sequence
  Synthetic
aggacagaatgtcctctggg

SEQ ID NO: 43436 - DNA, 20 bp, Artificial Sequence
  Synthetic
ggacagaatgtcctctggga

SEQ ID NO: 43437 - DNA, 20 bp, Artificial Sequence
  Synthetic
gtgagaagcagccctcccag

SEQ ID NO: 43438 - DNA, 20 bp, Artificial Sequence
  Synthetic
gggagggctgcttctcacac

SEQ ID NO: 43439 - DNA, 20 bp, Artificial Sequence
  Synthetic
ggagggctgcttctcacact

SEQ ID NO: 43440 - DNA, 20 bp, Artificial Sequence
  Synthetic
tcttttgccacattgccctg

SEQ ID NO: 43441 - DNA, 20 bp, Artificial Sequence
  Synthetic
gagtcaacctcagggcaatg

SEQ ID NO: 43442 - DNA, 20 bp, Artificial Sequence
  Synthetic
tgccctgaggttgactcttt

SEQ ID NO: 43443 - DNA, 20 bp, Artificial Sequence
  Synthetic
caccaaaagagtcaacctca

SEQ ID NO: 43444 - DNA, 20 bp, Artificial Sequence
  Synthetic
ccaccaaaagagtcaacctc

SEQ ID NO: 43445 - DNA, 20 bp, Artificial Sequence
  Synthetic
cctgaggttgactcttttgg

SEQ ID NO: 43446 - DNA, 20 bp, Artificial Sequence
  Synthetic
ctgaggttgactcttttggt

SEQ ID NO: 43447 - DNA, 20 bp, Artificial Sequence
  Synthetic
gactcttttggtgggatttg

SEQ ID NO: 43448 - DNA, 20 bp, Artificial Sequence
  Synthetic
ttgtgataagattagtaaca

SEQ ID NO: 43449 - DNA, 20 bp, Artificial Sequence
  Synthetic
tttacctgaaagcaacaatc

SEQ ID NO: 43450 - DNA, 20 bp, Artificial Sequence
  Synthetic
ttgacctgattgttgctttc

SEQ ID NO: 43451 - DNA, 20 bp, Artificial Sequence
  Synthetic
caggtcaagacacttaatta

SEQ ID NO: 43452 - DNA, 20 bp, Artificial Sequence
  Synthetic
aagacacttaattatggcct

SEQ ID NO: 43453 - DNA, 20 bp, Artificial Sequence
  Synthetic
agacacttaattatggccta

SEQ ID NO: 43454 - DNA, 20 bp, Artificial Sequence
  Synthetic
gacacttaattatggcctag

SEQ ID NO: 43455 - DNA, 20 bp, Artificial Sequence
  Synthetic
catttttctcactctcccct

SEQ ID NO: 43456 - DNA, 20 bp, Artificial Sequence
  Synthetic
ctaggggagagtgagaaaaa

SEQ ID NO: 43457 - DNA, 20 bp, Artificial Sequence
  Synthetic
atcgttgagaccccaattcc

SEQ ID NO: 43458 - DNA, 20 bp, Artificial Sequence
  Synthetic
aatatcgcatccaggaattg

SEQ ID NO: 43459 - DNA, 20 bp, Artificial Sequence
  Synthetic
taatatcgcatccaggaatt

SEQ ID NO: 43460 - DNA, 20 bp, Artificial Sequence
  Synthetic
ttaatatcgcatccaggaat

SEQ ID NO: 43461 - DNA, 20 bp, Artificial Sequence
  Synthetic
attcctggatgcgatattaa

SEQ ID NO: 43462 - DNA, 20 bp, Artificial Sequence
  Synthetic
ttcctggatgcgatattaat

SEQ ID NO: 43463 - DNA, 20 bp, Artificial Sequence
  Synthetic
ttcccattaatatcgcatcc

SEQ ID NO: 43464 - DNA, 20 bp, Artificial Sequence
  Synthetic
ggttttcagtgtggggcaaa

SEQ ID NO: 43465 - DNA, 20 bp, Artificial Sequence
  Synthetic
gggctatggttttcagtgtg

SEQ ID NO: 43466 - DNA, 20 bp, Artificial Sequence
  Synthetic
tgggctatggttttcagtgt

SEQ ID NO: 43467 - DNA, 20 bp, Artificial Sequence
  Synthetic
ctgggctatggttttcagtg

SEQ ID NO: 43468 - DNA, 20 bp, Artificial Sequence
  Synthetic
ggaatttgtgctctgggcta

SEQ ID NO: 43469 - DNA, 20 bp, Artificial Sequence
  Synthetic
cacagaggaatttgtgctct

SEQ ID NO: 43470 - DNA, 20 bp, Artificial Sequence
  Synthetic
gcacagaggaatttgtgctc

SEQ ID NO: 43471 - DNA, 20 bp, Artificial Sequence
  Synthetic
cagaaacacagagagcacag

SEQ ID NO: 43472 - DNA, 20 bp, Artificial Sequence
  Synthetic
gctagaagcagccagtttac

SEQ ID NO: 43473 - DNA, 20 bp, Artificial Sequence
  Synthetic
agttgggatggcctgtaaac

SEQ ID NO: 43474 - DNA, 20 bp, Artificial Sequence
  Synthetic
tacaggccatcccaactgag

SEQ ID NO: 43475 - DNA, 20 bp, Artificial Sequence
  Synthetic
cacaatcctctcagttggga

SEQ ID NO: 43476 - DNA, 20 bp, Artificial Sequence
  Synthetic
agttcacaatcctctcagtt

SEQ ID NO: 43477 - DNA, 20 bp, Artificial Sequence
  Synthetic
gagttcacaatcctctcagt

SEQ ID NO: 43478 - DNA, 20 bp, Artificial Sequence
  Synthetic
cactgctgctttaagctgag

SEQ ID NO: 43479 - DNA, 20 bp, Artificial Sequence
  Synthetic
gtcacgtcaggacacaattc

SEQ ID NO: 43480 - DNA, 20 bp, Artificial Sequence
  Synthetic
tgtgtcctgacgtgactatt

SEQ ID NO: 43481 - DNA, 20 bp, Artificial Sequence
  Synthetic
gtgtcctgacgtgactattt

SEQ ID NO: 43482 - DNA, 20 bp, Artificial Sequence
  Synthetic
tgtcctgacgtgactatttg

SEQ ID NO: 43483 - DNA, 20 bp, Artificial Sequence
  Synthetic
actccccaaatagtcacgtc

SEQ ID NO: 43484 - DNA, 20 bp, Artificial Sequence
  Synthetic
tgacgtgactatttggggag

SEQ ID NO: 43485 - DNA, 20 bp, Artificial Sequence
  Synthetic
acagcttcagtgtaacgctc

SEQ ID NO: 43486 - DNA, 20 bp, Artificial Sequence
  Synthetic
atgaccaccatacaacacac

SEQ ID NO: 43487 - DNA, 20 bp, Artificial Sequence
  Synthetic
cttacctgtgtgttgtatgg

SEQ ID NO: 43488 - DNA, 20 bp, Artificial Sequence
  Synthetic
cctcttacctgtgtgttgta

SEQ ID NO: 43489 - DNA, 20 bp, Artificial Sequence
  Synthetic
cttgccctttcaggacctaa

SEQ ID NO: 43490 - DNA, 20 bp, Artificial Sequence
  Synthetic
ttgccctttcaggacctaaa

SEQ ID NO: 43491 - DNA, 20 bp, Artificial Sequence
  Synthetic
tcggtaacgatgctcccttt

SEQ ID NO: 43492 - DNA, 20 bp, Artificial Sequence
  Synthetic
ggagcatcgttaccgacagc

SEQ ID NO: 43493 - DNA, 20 bp, Artificial Sequence
  Synthetic
catcgttaccgacagcaggc

SEQ ID NO: 43494 - DNA, 20 bp, Artificial Sequence
  Synthetic
aaggcgcacctgcctgctgt

SEQ ID NO: 43495 - DNA, 20 bp, Artificial Sequence
  Synthetic
aggcaggtgcgccttgccac

SEQ ID NO: 43496 - DNA, 20 bp, Artificial Sequence
  Synthetic
cagggaagatgcctgtggca

SEQ ID NO: 43497 - DNA, 20 bp, Artificial Sequence
  Synthetic
gataacagggaagatgcctg

SEQ ID NO: 43498 - DNA, 20 bp, Artificial Sequence
  Synthetic
ggttcaggaggctgataaca

SEQ ID NO: 43499 - DNA, 20 bp, Artificial Sequence
  Synthetic
tggttcaggaggctgataac

SEQ ID NO: 43500 - DNA, 20 bp, Artificial Sequence
  Synthetic
ggctacaggagtggttcagg

SEQ ID NO: 43501 - DNA, 20 bp, Artificial Sequence
  Synthetic
tggggctacaggagtggttc

SEQ ID NO: 43502 - DNA, 20 bp, Artificial Sequence
  Synthetic
tggtgttggggctacaggag

SEQ ID NO: 43503 - DNA, 20 bp, Artificial Sequence
  Synthetic
cacgctggtgttggggctac

SEQ ID NO: 43504 - DNA, 20 bp, Artificial Sequence
  Synthetic
tgaaggacacgctggtgttg

SEQ ID NO: 43505 - DNA, 20 bp, Artificial Sequence
  Synthetic
atgaaggacacgctggtgtt

SEQ ID NO: 43506 - DNA, 20 bp, Artificial Sequence
  Synthetic
aatgaaggacacgctggtgt

SEQ ID NO: 43507 - DNA, 20 bp, Artificial Sequence
  Synthetic
agtgctaatgaaggacacgc

SEQ ID NO: 43508 - DNA, 20 bp, Artificial Sequence
  Synthetic
ggtggcgacagtgctaatga

SEQ ID NO: 43509 - DNA, 20 bp, Artificial Sequence
  Synthetic
ttagcactgtcgccaccatc

SEQ ID NO: 43510 - DNA, 20 bp, Artificial Sequence
  Synthetic
tagcactgtcgccaccatcc

SEQ ID NO: 43511 - DNA, 20 bp, Artificial Sequence
  Synthetic
ccgctgtgacgcccggatgg

SEQ ID NO: 43512 - DNA, 20 bp, Artificial Sequence
  Synthetic
ccaccatccgggcgtcacag

SEQ ID NO: 43513 - DNA, 20 bp, Artificial Sequence
  Synthetic
aatccgctgtgacgcccgga

SEQ ID NO: 43514 - DNA, 20 bp, Artificial Sequence
  Synthetic
ttctaatccgctgtgacgcc

SEQ ID NO: 43515 - DNA, 20 bp, Artificial Sequence
  Synthetic
ggcgtcacagcggattagaa

SEQ ID NO: 43516 - DNA, 20 bp, Artificial Sequence
  Synthetic
gcgtcacagcggattagaaa

SEQ ID NO: 43517 - DNA, 20 bp, Artificial Sequence
  Synthetic
cgtcacagcggattagaaag

SEQ ID NO: 43518 - DNA, 20 bp, Artificial Sequence
  Synthetic
caagagattctccactgcta

SEQ ID NO: 43519 - DNA, 20 bp, Artificial Sequence
  Synthetic
gggatggctcaccatagcag

SEQ ID NO: 43520 - DNA, 20 bp, Artificial Sequence
  Synthetic
atccggctcttgtgaggccc

SEQ ID NO: 43521 - DNA, 20 bp, Artificial Sequence
  Synthetic
ccctctgccctctcagggaa

SEQ ID NO: 43522 - DNA, 20 bp, Artificial Sequence
  Synthetic
cctctgccctctcagggaaa

SEQ ID NO: 43523 - DNA, 20 bp, Artificial Sequence
  Synthetic
ctctgccctctcagggaaag

SEQ ID NO: 43524 - DNA, 20 bp, Artificial Sequence
  Synthetic
tgtttgccacacagctcatc

SEQ ID NO: 43525 - DNA, 20 bp, Artificial Sequence
  Synthetic
tgccacacagctcatccgga

SEQ ID NO: 43526 - DNA, 20 bp, Artificial Sequence
  Synthetic
gccacacagctcatccggaa

SEQ ID NO: 43527 - DNA, 20 bp, Artificial Sequence
  Synthetic
ccccttccggatgagctgtg

SEQ ID NO: 43528 - DNA, 20 bp, Artificial Sequence
  Synthetic
ccacacagctcatccggaag

SEQ ID NO: 43529 - DNA, 20 bp, Artificial Sequence
  Synthetic
cacacagctcatccggaagg

SEQ ID NO: 43530 - DNA, 20 bp, Artificial Sequence
  Synthetic
cgaagatggtctcccccttc

SEQ ID NO: 43531 - DNA, 20 bp, Artificial Sequence
  Synthetic
gggagaccatcttcgtagaa

SEQ ID NO: 43532 - DNA, 20 bp, Artificial Sequence
  Synthetic
caggggccgttctacgaaga

SEQ ID NO: 43533 - DNA, 20 bp, Artificial Sequence
  Synthetic
catcttcgtagaacggcccc

SEQ ID NO: 43534 - DNA, 20 bp, Artificial Sequence
  Synthetic
cttcgtagaacggcccctgg

SEQ ID NO: 43535 - DNA, 20 bp, Artificial Sequence
  Synthetic
agaaactgtgcagccaccag

SEQ ID NO: 43536 - DNA, 20 bp, Artificial Sequence
  Synthetic
gagaaactgtgcagccacca

SEQ ID NO: 43537 - DNA, 20 bp, Artificial Sequence
  Synthetic
agagaaactgtgcagccacc

SEQ ID NO: 43538 - DNA, 20 bp, Artificial Sequence
  Synthetic
tggtggctgcacagtttctc

SEQ ID NO: 43539 - DNA, 20 bp, Artificial Sequence
  Synthetic
aatgcactttatcgctaccg

SEQ ID NO: 43540 - DNA, 20 bp, Artificial Sequence
  Synthetic
cagcctgtgaccactgcctt

SEQ ID NO: 43541 - DNA, 20 bp, Artificial Sequence
  Synthetic
agcctgtgaccactgcctta

SEQ ID NO: 43542 - DNA, 20 bp, Artificial Sequence
  Synthetic
tgccctaaggcagtggtcac

SEQ ID NO: 43543 - DNA, 20 bp, Artificial Sequence
  Synthetic
tctctagtgccctaaggcag

SEQ ID NO: 43544 - DNA, 20 bp, Artificial Sequence
  Synthetic
ctgccttagggcactagaga

SEQ ID NO: 43545 - DNA, 20 bp, Artificial Sequence
  Synthetic
ctgccttctctagtgcccta

SEQ ID NO: 43546 - DNA, 20 bp, Artificial Sequence
  Synthetic
tagggcactagagaaggcag

SEQ ID NO: 43547 - DNA, 20 bp, Artificial Sequence
  Synthetic
aggcagaggagaatgcccag

SEQ ID NO: 43548 - DNA, 20 bp, Artificial Sequence
  Synthetic
gagaatgcccagaggctgac

SEQ ID NO: 43549 - DNA, 20 bp, Artificial Sequence
  Synthetic
agaatgcccagaggctgacc

SEQ ID NO: 43550 - DNA, 20 bp, Artificial Sequence
  Synthetic
tggtttcccggtcagcctct

SEQ ID NO: 43551 - DNA, 20 bp, Artificial Sequence
  Synthetic
ctggtttcccggtcagcctc

SEQ ID NO: 43552 - DNA, 20 bp, Artificial Sequence
  Synthetic
cagaggctgaccgggaaacc

SEQ ID NO: 43553 - DNA, 20 bp, Artificial Sequence
  Synthetic
gctgaccgggaaaccaggcc

SEQ ID NO: 43554 - DNA, 20 bp, Artificial Sequence
  Synthetic
cagaacctggcctggtttcc

SEQ ID NO: 43555 - DNA, 20 bp, Artificial Sequence
  Synthetic
gggtgaggcagaacctggcc

SEQ ID NO: 43556 - DNA, 20 bp, Artificial Sequence
  Synthetic
gctctgggtgaggcagaacc

SEQ ID NO: 43557 - DNA, 20 bp, Artificial Sequence
  Synthetic
acagtgcacagctctgggtg

SEQ ID NO: 43558 - DNA, 20 bp, Artificial Sequence
  Synthetic
tgcgcacagtgcacagctct

SEQ ID NO: 43559 - DNA, 20 bp, Artificial Sequence
  Synthetic
ttgcgcacagtgcacagctc

SEQ ID NO: 43560 - DNA, 20 bp, Artificial Sequence
  Synthetic
aatggggacagttctggtgg

SEQ ID NO: 43561 - DNA, 20 bp, Artificial Sequence
  Synthetic
ggcaatggggacagttctgg

SEQ ID NO: 43562 - DNA, 20 bp, Artificial Sequence
  Synthetic
cttggcaatggggacagttc

SEQ ID NO: 43563 - DNA, 20 bp, Artificial Sequence
  Synthetic
agaatactcacttggcaatg

SEQ ID NO: 43564 - DNA, 20 bp, Artificial Sequence
  Synthetic
aagaatactcacttggcaat

SEQ ID NO: 43565 - DNA, 20 bp, Artificial Sequence
  Synthetic
caagaatactcacttggcaa

SEQ ID NO: 43566 - DNA, 20 bp, Artificial Sequence
  Synthetic
tgtactgcagtgcagaatgt

SEQ ID NO: 43567 - DNA, 20 bp, Artificial Sequence
  Synthetic
ctgcagtgcagaatgtcggt

SEQ ID NO: 43568 - DNA, 20 bp, Artificial Sequence
  Synthetic
agccactgagcaataccacc

SEQ ID NO: 43569 - DNA, 20 bp, Artificial Sequence
  Synthetic
gacctggtggtattgctcag

SEQ ID NO: 43570 - DNA, 20 bp, Artificial Sequence
  Synthetic
taccaccaggtcctgtgccc

SEQ ID NO: 43571 - DNA, 20 bp, Artificial Sequence
  Synthetic
ggcctgggcacaggacctgg

SEQ ID NO: 43572 - DNA, 20 bp, Artificial Sequence
  Synthetic
aggggcctgggcacaggacc

SEQ ID NO: 43573 - DNA, 20 bp, Artificial Sequence
  Synthetic
cctgggaggggcctgggcac

SEQ ID NO: 43574 - DNA, 20 bp, Artificial Sequence
  Synthetic
cctgtgcccaggcccctccc

SEQ ID NO: 43575 - DNA, 20 bp, Artificial Sequence
  Synthetic
ggtcatcctgggaggggcct

SEQ ID NO: 43576 - DNA, 20 bp, Artificial Sequence
  Synthetic
gggtcatcctgggaggggcc

SEQ ID NO: 43577 - DNA, 20 bp, Artificial Sequence
  Synthetic
gcaaggggtcatcctgggag

SEQ ID NO: 43578 - DNA, 20 bp, Artificial Sequence
  Synthetic
tgcaaggggtcatcctggga

SEQ ID NO: 43579 - DNA, 20 bp, Artificial Sequence
  Synthetic
atgcaaggggtcatcctggg

SEQ ID NO: 43580 - DNA, 20 bp, Artificial Sequence
  Synthetic
aggatgcaaggggtcatcct

SEQ ID NO: 43581 - DNA, 20 bp, Artificial Sequence
  Synthetic
gaggatgcaaggggtcatcc

SEQ ID NO: 43582 - DNA, 20 bp, Artificial Sequence
  Synthetic
gcttattgagaggatgcaag

SEQ ID NO: 43583 - DNA, 20 bp, Artificial Sequence
  Synthetic
agcttattgagaggatgcaa

SEQ ID NO: 43584 - DNA, 20 bp, Artificial Sequence
  Synthetic
aagcttattgagaggatgca

SEQ ID NO: 43585 - DNA, 20 bp, Artificial Sequence
  Synthetic
gcatcctctcaataagcttc

SEQ ID NO: 43586 - DNA, 20 bp, Artificial Sequence
  Synthetic
tcctctcaataagcttcagg

SEQ ID NO: 43587 - DNA, 20 bp, Artificial Sequence
  Synthetic
gcctcctgaagcttattgag

SEQ ID NO: 43588 - DNA, 20 bp, Artificial Sequence
  Synthetic
tcaataagcttcaggaggca

SEQ ID NO: 43589 - DNA, 20 bp, Artificial Sequence
  Synthetic
ataagcttcaggaggcatgg

SEQ ID NO: 43590 - DNA, 20 bp, Artificial Sequence
  Synthetic
gcttcaggaggcatggaggt

SEQ ID NO: 43591 - DNA, 20 bp, Artificial Sequence
  Synthetic
aggtgggtagtgaatactcc

SEQ ID NO: 43592 - DNA, 20 bp, Artificial Sequence
  Synthetic
tgatgcttgcagtctcaggt

SEQ ID NO: 43593 - DNA, 20 bp, Artificial Sequence
  Synthetic
atgatgcttgcagtctcagg

SEQ ID NO: 43594 - DNA, 20 bp, Artificial Sequence
  Synthetic
aacatgatgcttgcagtctc

SEQ ID NO: 43595 - DNA, 20 bp, Artificial Sequence
  Synthetic
gactgcaagcatcatgttga

SEQ ID NO: 43596 - DNA, 20 bp, Artificial Sequence
  Synthetic
caagcatcatgttgatggct

SEQ ID NO: 43597 - DNA, 20 bp, Artificial Sequence
  Synthetic
catcatgttgatggctagga

SEQ ID NO: 43598 - DNA, 20 bp, Artificial Sequence
  Synthetic
catgttgatggctaggatgg

SEQ ID NO: 43599 - DNA, 20 bp, Artificial Sequence
  Synthetic
gatggtggccacagtgaagc

SEQ ID NO: 43600 - DNA, 20 bp, Artificial Sequence
  Synthetic
tgggctcacctgcttcactg

SEQ ID NO: 43601 - DNA, 20 bp, Artificial Sequence
  Synthetic
tgtttgttcactgcaggcga

SEQ ID NO: 43602 - DNA, 20 bp, Artificial Sequence
  Synthetic
ttcactgcaggcgaaggaca

SEQ ID NO: 43603 - DNA, 20 bp, Artificial Sequence
  Synthetic
aggcgaaggacaaggaccgt

SEQ ID NO: 43604 - DNA, 20 bp, Artificial Sequence
  Synthetic
gggaaaagagtctgatccaa

SEQ ID NO: 43605 - DNA, 20 bp, Artificial Sequence
  Synthetic
ggctgttttgttacaaaact

SEQ ID NO: 43606 - DNA, 20 bp, Artificial Sequence
  Synthetic
tggctgttttgttacaaaac

SEQ ID NO: 43607 - DNA, 20 bp, Artificial Sequence
  Synthetic
taacaaaacagccaatgaag

SEQ ID NO: 43608 - DNA, 20 bp, Artificial Sequence
  Synthetic
caaaacagccaatgaagagg

SEQ ID NO: 43609 - DNA, 20 bp, Artificial Sequence
  Synthetic
gacaatttcctcctcttcat

SEQ ID NO: 43610 - DNA, 20 bp, Artificial Sequence
  Synthetic
ggaaattgtccataaacttc

SEQ ID NO: 43611 - DNA, 20 bp, Artificial Sequence
  Synthetic
gaaattgtccataaacttct

SEQ ID NO: 43612 - DNA, 20 bp, Artificial Sequence
  Synthetic
atttgtctcccagaagttta

SEQ ID NO: 43613 - DNA, 20 bp, Artificial Sequence
  Synthetic
acttctgggagacaaattca

SEQ ID NO: 43614 - DNA, 20 bp, Artificial Sequence
  Synthetic
tcctctaatccagggccaac

SEQ ID NO: 43615 - DNA, 20 bp, Artificial Sequence
  Synthetic
gcagaagttccagttggccc

SEQ ID NO: 43616 - DNA, 20 bp, Artificial Sequence
  Synthetic
agggccaactggaacttctg

SEQ ID NO: 43617 - DNA, 20 bp, Artificial Sequence
  Synthetic
gtctccgcagaagttccagt

SEQ ID NO: 43618 - DNA, 20 bp, Artificial Sequence
  Synthetic
tctgcggagactcttcacag

SEQ ID NO: 43619 - DNA, 20 bp, Artificial Sequence
  Synthetic
cttcacagaggccctctatg

SEQ ID NO: 43620 - DNA, 20 bp, Artificial Sequence
  Synthetic
gctgactgcttcctcataga

SEQ ID NO: 43621 - DNA, 20 bp, Artificial Sequence
  Synthetic
ggctgactgcttcctcatag

SEQ ID NO: 43622 - DNA, 20 bp, Artificial Sequence
  Synthetic
ctatgaggaagcagtcagcc

SEQ ID NO: 43623 - DNA, 20 bp, Artificial Sequence
  Synthetic
ccacagtggttcactccaga

SEQ ID NO: 43624 - DNA, 20 bp, Artificial Sequence
  Synthetic
ggttcactccagatggattc

SEQ ID NO: 43625 - DNA, 20 bp, Artificial Sequence
  Synthetic
aagagagaccggaatccatc

SEQ ID NO: 43626 - DNA, 20 bp, Artificial Sequence
  Synthetic
caacaagagcaaagagagac

SEQ ID NO: 43627 - DNA, 20 bp, Artificial Sequence
  Synthetic
cggtctctctttgctcttgt

SEQ ID NO: 43628 - DNA, 20 bp, Artificial Sequence
  Synthetic
ggtctctctttgctcttgtt

SEQ ID NO: 43629 - DNA, 20 bp, Artificial Sequence
  Synthetic
tttgctcttgttgggaccaa

SEQ ID NO: 43630 - DNA, 20 bp, Artificial Sequence
  Synthetic
cttgttgggaccaatggcca

SEQ ID NO: 43631 - DNA, 20 bp, Artificial Sequence
  Synthetic
gggaccaatggccaaggaat

SEQ ID NO: 43632 - DNA, 20 bp, Artificial Sequence
  Synthetic
ggaccaatggccaaggaatc

SEQ ID NO: 43633 - DNA, 20 bp, Artificial Sequence
  Synthetic
ggtcccgattccttggccat

SEQ ID NO: 43634 - DNA, 20 bp, Artificial Sequence
  Synthetic
atggccaaggaatcgggacc

SEQ ID NO: 43635 - DNA, 20 bp, Artificial Sequence
  Synthetic
ctaacctggtcccgattcct

SEQ ID NO: 43636 - DNA, 20 bp, Artificial Sequence
  Synthetic
cccccagctccctaagccag

SEQ ID NO: 43637 - DNA, 20 bp, Artificial Sequence
  Synthetic
ccccagctccctaagccagt

SEQ ID NO: 43638 - DNA, 20 bp, Artificial Sequence
  Synthetic
gacccactggcttagggagc

SEQ ID NO: 43639 - DNA, 20 bp, Artificial Sequence
  Synthetic
ggcatggacccactggctta

SEQ ID NO: 43640 - DNA, 20 bp, Artificial Sequence
  Synthetic
aggcatggacccactggctt

SEQ ID NO: 43641 - DNA, 20 bp, Artificial Sequence
  Synthetic
tgtcacaggcatggacccac

SEQ ID NO: 43642 - DNA, 20 bp, Artificial Sequence
  Synthetic
ggtccatgcctgtgacactc

SEQ ID NO: 43643 - DNA, 20 bp, Artificial Sequence
  Synthetic
actccagagtgtcacaggca

SEQ ID NO: 43644 - DNA, 20 bp, Artificial Sequence
  Synthetic
cttcaactccagagtgtcac

SEQ ID NO: 43645 - DNA, 20 bp, Artificial Sequence
  Synthetic
cactctggagttgaagcctc

SEQ ID NO: 43646 - DNA, 20 bp, Artificial Sequence
  Synthetic
tcaagctgctcacggtcctg

SEQ ID NO: 43647 - DNA, 20 bp, Artificial Sequence
  Synthetic
tgaaggcgtcaagctgctca

SEQ ID NO: 43648 - DNA, 20 bp, Artificial Sequence
  Synthetic
cttgtatagctggtcaatga

SEQ ID NO: 43649 - DNA, 20 bp, Artificial Sequence
  Synthetic
cttcattgaccagctataca

SEQ ID NO: 43650 - DNA, 20 bp, Artificial Sequence
  Synthetic
cctcgatgtccttgtatagc

SEQ ID NO: 43651 - DNA, 20 bp, Artificial Sequence
  Synthetic
ccagctatacaaggacatcg

SEQ ID NO: 43652 - DNA, 20 bp, Artificial Sequence
  Synthetic
ctatacaaggacatcgaggc

SEQ ID NO: 43653 - DNA, 20 bp, Artificial Sequence
  Synthetic
acaaggacatcgaggcaggt

SEQ ID NO: 43654 - DNA, 20 bp, Artificial Sequence
  Synthetic
tattactgtcttacagcaac

SEQ ID NO: 43655 - DNA, 20 bp, Artificial Sequence
  Synthetic
ggagagtttcttaactgtga

SEQ ID NO: 43656 - DNA, 20 bp, Artificial Sequence
  Synthetic
tttcttaactgtgaaggatc

SEQ ID NO: 43657 - DNA, 20 bp, Artificial Sequence
  Synthetic
agcagctctgaagcacaaag

SEQ ID NO: 43658 - DNA, 20 bp, Artificial Sequence
  Synthetic
ggcacacaactgtggttgcc

SEQ ID NO: 43659 - DNA, 20 bp, Artificial Sequence
  Synthetic
ctgcattgggcacacaactg

SEQ ID NO: 43660 - DNA, 20 bp, Artificial Sequence
  Synthetic
ggaaaggaggtctctgcatt

SEQ ID NO: 43661 - DNA, 20 bp, Artificial Sequence
  Synthetic
tggaaaggaggtctctgcat

SEQ ID NO: 43662 - DNA, 20 bp, Artificial Sequence
  Synthetic
gaagttgttttctggaaagg

SEQ ID NO: 43663 - DNA, 20 bp, Artificial Sequence
  Synthetic
aaggaagttgttttctggaa

SEQ ID NO: 43664 - DNA, 20 bp, Artificial Sequence
  Synthetic
tgcaaaaggaagttgttttc

SEQ ID NO: 43665 - DNA, 20 bp, Artificial Sequence
  Synthetic
ccagagcagtgacatgcaaa

SEQ ID NO: 43666 - DNA, 20 bp, Artificial Sequence
  Synthetic
ccttttgcatgtcactgctc

SEQ ID NO: 43667 - DNA, 20 bp, Artificial Sequence
  Synthetic
tttgcatgtcactgctctgg

SEQ ID NO: 43668 - DNA, 20 bp, Artificial Sequence
  Synthetic
gctctggaggatattaagcc

SEQ ID NO: 43669 - DNA, 20 bp, Artificial Sequence
  Synthetic
ggaggatattaagccaggag

SEQ ID NO: 43670 - DNA, 20 bp, Artificial Sequence
  Synthetic
ctggtccccctcacctctcc

SEQ ID NO: 43671 - DNA, 20 bp, Artificial Sequence
  Synthetic
ggaaatttgtatcagctact

SEQ ID NO: 43672 - DNA, 20 bp, Artificial Sequence
  Synthetic
agggcccacagaagcccatg

SEQ ID NO: 43673 - DNA, 20 bp, Artificial Sequence
  Synthetic
ttaaccacatgggcttctgt

SEQ ID NO: 43674 - DNA, 20 bp, Artificial Sequence
  Synthetic
tttaaccacatgggcttctg

SEQ ID NO: 43675 - DNA, 20 bp, Artificial Sequence
  Synthetic
ttgactttgtttaaccacat

SEQ ID NO: 43676 - DNA, 20 bp, Artificial Sequence
  Synthetic
cttgactttgtttaaccaca

SEQ ID NO: 43677 - DNA, 20 bp, Artificial Sequence
  Synthetic
cagatgtacacccgagtaga

SEQ ID NO: 43678 - DNA, 20 bp, Artificial Sequence
  Synthetic
agatgtacacccgagtagaa

SEQ ID NO: 43679 - DNA, 20 bp, Artificial Sequence
  Synthetic
ctgcacaaacccttctactc

SEQ ID NO: 43680 - DNA, 20 bp, Artificial Sequence
  Synthetic
cctgcacaaacccttctact

SEQ ID NO: 43681 - DNA, 20 bp, Artificial Sequence
  Synthetic
ccgagtagaagggtttgtgc

SEQ ID NO: 43682 - DNA, 20 bp, Artificial Sequence
  Synthetic
tctcatctttcataaccaca

SEQ ID NO: 43683 - DNA, 20 bp, Artificial Sequence
  Synthetic
ataaccacaaggaattttac

SEQ ID NO: 43684 - DNA, 20 bp, Artificial Sequence
  Synthetic
taaccacaaggaattttaca

SEQ ID NO: 43685 - DNA, 20 bp, Artificial Sequence
  Synthetic
tcaccctgtaaaattccttg

SEQ ID NO: 43686 - DNA, 20 bp, Artificial Sequence
  Synthetic
agaggcgtgtcaaggcctga

SEQ ID NO: 43687 - DNA, 20 bp, Artificial Sequence
  Synthetic
aaggcctgaaggagcccatg

SEQ ID NO: 43688 - DNA, 20 bp, Artificial Sequence
  Synthetic
ccaaccacatgggctccttc

SEQ ID NO: 43689 - DNA, 20 bp, Artificial Sequence
  Synthetic
cctgaaggagcccatgtggt

SEQ ID NO: 43690 - DNA, 20 bp, Artificial Sequence
  Synthetic
ttgattttatccaaccacat

SEQ ID NO: 43691 - DNA, 20 bp, Artificial Sequence
  Synthetic
cttgattttatccaaccaca

SEQ ID NO: 43692 - DNA, 20 bp, Artificial Sequence
  Synthetic
ggttggataaaatcaagaaa

SEQ ID NO: 43693 - DNA, 20 bp, Artificial Sequence
  Synthetic
aagaaaaggctgaatgagca

SEQ ID NO: 43694 - DNA, 20 bp, Artificial Sequence
  Synthetic
tgagcacggttacccccaag

SEQ ID NO: 43695 - DNA, 20 bp, Artificial Sequence
  Synthetic
gcacggttacccccaagtgg

SEQ ID NO: 43696 - DNA, 20 bp, Artificial Sequence
  Synthetic
cacggttacccccaagtgga

SEQ ID NO: 43697 - DNA, 20 bp, Artificial Sequence
  Synthetic
acggttacccccaagtggag

SEQ ID NO: 43698 - DNA, 20 bp, Artificial Sequence
  Synthetic
gtacaaacccctccacttgg

SEQ ID NO: 43699 - DNA, 20 bp, Artificial Sequence
  Synthetic
tgtacaaacccctccacttg

SEQ ID NO: 43700 - DNA, 20 bp, Artificial Sequence
  Synthetic
ttgtacaaacccctccactt

SEQ ID NO: 43701 - DNA, 20 bp, Artificial Sequence
  Synthetic
cttgtacaaacccctccact

SEQ ID NO: 43702 - DNA, 20 bp, Artificial Sequence
  Synthetic
gcctcatcttccagaaccac

SEQ ID NO: 43703 - DNA, 20 bp, Artificial Sequence
  Synthetic
ccctgtggttctggaagatg

SEQ ID NO: 43704 - DNA, 20 bp, Artificial Sequence
  Synthetic
cctcatcttccagaaccaca

SEQ ID NO: 43705 - DNA, 20 bp, Artificial Sequence
  Synthetic
tgtaagaggccctgtggttc

SEQ ID NO: 43706 - DNA, 20 bp, Artificial Sequence
  Synthetic
gaaccacagggcctcttaca

SEQ ID NO: 43707 - DNA, 20 bp, Artificial Sequence
  Synthetic
ctaccttgtaagaggccctg

SEQ ID NO: 43708 - DNA, 20 bp, Artificial Sequence
  Synthetic
cacagggcctcttacaaggt

SEQ ID NO: 43709 - DNA, 20 bp, Artificial Sequence
  Synthetic
agagccacctaccttgtaag

SEQ ID NO: 43710 - DNA, 20 bp, Artificial Sequence
  Synthetic
tttattattttttcagtaca

SEQ ID NO: 43711 - DNA, 20 bp, Artificial Sequence
  Synthetic
gagaaacctggatgagtgtg

SEQ ID NO: 43712 - DNA, 20 bp, Artificial Sequence
  Synthetic
tggatgagtgtgaggtgtgc

SEQ ID NO: 43713 - DNA, 20 bp, Artificial Sequence
  Synthetic
ggatgagtgtgaggtgtgcc

SEQ ID NO: 43714 - DNA, 20 bp, Artificial Sequence
  Synthetic
gagtgtgaggtgtgccggga

SEQ ID NO: 43715 - DNA, 20 bp, Artificial Sequence
  Synthetic
tgtgaggtgtgccgggacgg

SEQ ID NO: 43716 - DNA, 20 bp, Artificial Sequence
  Synthetic
gtgaggtgtgccgggacgga

SEQ ID NO: 43717 - DNA, 20 bp, Artificial Sequence
  Synthetic
tgaggtgtgccgggacggag

SEQ ID NO: 43718 - DNA, 20 bp, Artificial Sequence
  Synthetic
agaacagctcccctccgtcc

SEQ ID NO: 43719 - DNA, 20 bp, Artificial Sequence
  Synthetic
ttgttcaagagtcttccatg

SEQ ID NO: 43720 - DNA, 20 bp, Artificial Sequence
  Synthetic
gcgggatgtgacagtcctca

SEQ ID NO: 43721 - DNA, 20 bp, Artificial Sequence
  Synthetic
ggactgtcacatcccgcctg

SEQ ID NO: 43722 - DNA, 20 bp, Artificial Sequence
  Synthetic
tcccgcctgtggaagctgag

SEQ ID NO: 43723 - DNA, 20 bp, Artificial Sequence
  Synthetic
acctctcagcttccacaggc

SEQ ID NO: 43724 - DNA, 20 bp, Artificial Sequence
  Synthetic
tacctctcagcttccacagg

SEQ ID NO: 43725 - DNA, 20 bp, Artificial Sequence
  Synthetic
acttacctctcagcttccac

SEQ ID NO: 43726 - DNA, 20 bp, Artificial Sequence
  Synthetic
tccaatctctcaggaccccg

SEQ ID NO: 43727 - DNA, 20 bp, Artificial Sequence
  Synthetic
gcagaagatgcaattccacg

SEQ ID NO: 43728 - DNA, 20 bp, Artificial Sequence
  Synthetic
tgcagaagatgcaattccac

SEQ ID NO: 43729 - DNA, 20 bp, Artificial Sequence
  Synthetic
ctgcagaagatgcaattcca

SEQ ID NO: 43730 - DNA, 20 bp, Artificial Sequence
  Synthetic
cgtggaattgcatcttctgc

SEQ ID NO: 43731 - DNA, 20 bp, Artificial Sequence
  Synthetic
ttgcatcttctgcaggatga

SEQ ID NO: 43732 - DNA, 20 bp, Artificial Sequence
  Synthetic
agaggcgtgtcaaggcctga

SEQ ID NO: 43733 - DNA, 20 bp, Artificial Sequence
  Synthetic
aaggcctgaaggagcccatg

SEQ ID NO: 43734 - DNA, 20 bp, Artificial Sequence
  Synthetic
ccaaccacatgggctccttc

SEQ ID NO: 43735 - DNA, 20 bp, Artificial Sequence
  Synthetic
cctgaaggagcccatgtggt

SEQ ID NO: 43736 - DNA, 20 bp, Artificial Sequence
  Synthetic
ttgattttatccaaccacat

SEQ ID NO: 43737 - DNA, 20 bp, Artificial Sequence
  Synthetic
cttgattttatccaaccaca

SEQ ID NO: 43738 - DNA, 20 bp, Artificial Sequence
  Synthetic
ggttggataaaatcaagaaa

SEQ ID NO: 43739 - DNA, 20 bp, Artificial Sequence
  Synthetic
aagaaaaggctgaatgagca

SEQ ID NO: 43740 - DNA, 20 bp, Artificial Sequence
  Synthetic
tgagcacggttacccccaag

SEQ ID NO: 43741 - DNA, 20 bp, Artificial Sequence
  Synthetic
gcacggttacccccaagtgg

SEQ ID NO: 43742 - DNA, 20 bp, Artificial Sequence
  Synthetic
cacggttacccccaagtgga

SEQ ID NO: 43743 - DNA, 20 bp, Artificial Sequence
  Synthetic
acggttacccccaagtggag

SEQ ID NO: 43744 - DNA, 20 bp, Artificial Sequence
  Synthetic
gtacaaacccctccacttgg

SEQ ID NO: 43745 - DNA, 20 bp, Artificial Sequence
  Synthetic
tgtacaaacccctccacttg

SEQ ID NO: 43746 - DNA, 20 bp, Artificial Sequence
  Synthetic
ttgtacaaacccctccactt

SEQ ID NO: 43747 - DNA, 20 bp, Artificial Sequence
  Synthetic
cttgtacaaacccctccact

SEQ ID NO: 43748 - DNA, 20 bp, Artificial Sequence
  Synthetic
gcctcatcttccagaaccac

SEQ ID NO: 43749 - DNA, 20 bp, Artificial Sequence
  Synthetic
ccctgtggttctggaagatg

SEQ ID NO: 43750 - DNA, 20 bp, Artificial Sequence
  Synthetic
cctcatcttccagaaccaca

SEQ ID NO: 43751 - DNA, 20 bp, Artificial Sequence
  Synthetic
tgtaagaggccctgtggttc

SEQ ID NO: 43752 - DNA, 20 bp, Artificial Sequence
  Synthetic
gaaccacagggcctcttaca

SEQ ID NO: 43753 - DNA, 20 bp, Artificial Sequence
  Synthetic
ctaccttgtaagaggccctg

SEQ ID NO: 43754 - DNA, 20 bp, Artificial Sequence
  Synthetic
cacagggcctcttacaaggt

SEQ ID NO: 43755 - DNA, 20 bp, Artificial Sequence
  Synthetic
agagccacctaccttgtaag

SEQ ID NO: 43756 - DNA, 20 bp, Artificial Sequence
  Synthetic
tattacttttttccagtata

SEQ ID NO: 43757 - DNA, 20 bp, Artificial Sequence
  Synthetic
tttggccaaaatccttatac

SEQ ID NO: 43758 - DNA, 20 bp, Artificial Sequence
  Synthetic
gagaaacttggatgagtgtg

SEQ ID NO: 43759 - DNA, 20 bp, Artificial Sequence
  Synthetic
tggatgagtgtgaggtgtgc

SEQ ID NO: 43760 - DNA, 20 bp, Artificial Sequence
  Synthetic
ggatgagtgtgaggtgtgcc

SEQ ID NO: 43761 - DNA, 20 bp, Artificial Sequence
  Synthetic
gagtgtgaggtgtgccggga

SEQ ID NO: 43762 - DNA, 20 bp, Artificial Sequence
  Synthetic
tgtgaggtgtgccgggacgg

SEQ ID NO: 43763 - DNA, 20 bp, Artificial Sequence
  Synthetic
gtgaggtgtgccgggacgga

SEQ ID NO: 43764 - DNA, 20 bp, Artificial Sequence
  Synthetic
tgaggtgtgccgggacggag

SEQ ID NO: 43765 - DNA, 20 bp, Artificial Sequence
  Synthetic
agaacagctcccctccgtcc

SEQ ID NO: 43766 - DNA, 20 bp, Artificial Sequence
  Synthetic
ttgttcaagagtcttccatg

SEQ ID NO: 43767 - DNA, 20 bp, Artificial Sequence
  Synthetic
gtgggatgtggcagtcctca

SEQ ID NO: 43768 - DNA, 20 bp, Artificial Sequence
  Synthetic
ggactgccacatcccacctg

SEQ ID NO: 43769 - DNA, 20 bp, Artificial Sequence
  Synthetic
cactttccacaggtgggatg

SEQ ID NO: 43770 - DNA, 20 bp, Artificial Sequence
  Synthetic
acttctcactttccacaggt

SEQ ID NO: 43771 - DNA, 20 bp, Artificial Sequence
  Synthetic
tacttctcactttccacagg

SEQ ID NO: 43772 - DNA, 20 bp, Artificial Sequence
  Synthetic
acttacttctcactttccac

SEQ ID NO: 43773 - DNA, 20 bp, Artificial Sequence
  Synthetic
tccaatctctcaggaccccg

SEQ ID NO: 43774 - DNA, 20 bp, Artificial Sequence
  Synthetic
gcagaagatgcaattccacg

SEQ ID NO: 43775 - DNA, 20 bp, Artificial Sequence
  Synthetic
tgcagaagatgcaattccac

SEQ ID NO: 43776 - DNA, 20 bp, Artificial Sequence
  Synthetic
ctgcagaagatgcaattcca

SEQ ID NO: 43777 - DNA, 20 bp, Artificial Sequence
  Synthetic
cgtggaattgcatcttctgc

SEQ ID NO: 43778 - DNA, 20 bp, Artificial Sequence
  Synthetic
ttgcatcttctgcaggatga

SEQ ID NO: 43779 - DNA, 20 bp, Artificial Sequence
  Synthetic
ctccgggagtaccagcacat

SEQ ID NO: 43780 - DNA, 20 bp, Artificial Sequence
  Synthetic
tccgggagtaccagcacatt

SEQ ID NO: 43781 - DNA, 20 bp, Artificial Sequence
  Synthetic
accagcacattgggctagac

SEQ ID NO: 43782 - DNA, 20 bp, Artificial Sequence
  Synthetic
gccagtctagcccaatgtgc

SEQ ID NO: 43783 - DNA, 20 bp, Artificial Sequence
  Synthetic
gcacattgggctagactggc

SEQ ID NO: 43784 - DNA, 20 bp, Artificial Sequence
  Synthetic
attaagcttcttctcataca

SEQ ID NO: 43785 - DNA, 20 bp, Artificial Sequence
  Synthetic
atgtatgagaagaagcttaa

SEQ ID NO: 43786 - DNA, 20 bp, Artificial Sequence
  Synthetic
tggcattcttgctgatgaga

SEQ ID NO: 43787 - DNA, 20 bp, Artificial Sequence
  Synthetic
ggcattcttgctgatgagat

SEQ ID NO: 43788 - DNA, 20 bp, Artificial Sequence
  Synthetic
gcattcttgctgatgagatg

SEQ ID NO: 43789 - DNA, 20 bp, Artificial Sequence
  Synthetic
cttgctgatgagatggggct

SEQ ID NO: 43790 - DNA, 20 bp, Artificial Sequence
  Synthetic
ttgctgatgagatggggctt

SEQ ID NO: 43791 - DNA, 20 bp, Artificial Sequence
  Synthetic
aagcagagagatggtctgga

SEQ ID NO: 43792 - DNA, 20 bp, Artificial Sequence
  Synthetic
gggcaagcagagagatggtc

SEQ ID NO: 43793 - DNA, 20 bp, Artificial Sequence
  Synthetic
caagtgggcaagcagagaga

SEQ ID NO: 43794 - DNA, 20 bp, Artificial Sequence
  Synthetic
catctctctgcttgcccact

SEQ ID NO: 43795 - DNA, 20 bp, Artificial Sequence
  Synthetic
gcccacttggcttgtgagaa

SEQ ID NO: 43796 - DNA, 20 bp, Artificial Sequence
  Synthetic
acctttctcacaagccaagt

SEQ ID NO: 43797 - DNA, 20 bp, Artificial Sequence
  Synthetic
tacctttctcacaagccaag

SEQ ID NO: 43798 - DNA, 20 bp, Artificial Sequence
  Synthetic
ttttttgcctaacaggtaac

SEQ ID NO: 43799 - DNA, 20 bp, Artificial Sequence
  Synthetic
tttttgcctaacaggtaact

SEQ ID NO: 43800 - DNA, 20 bp, Artificial Sequence
  Synthetic
ttttgcctaacaggtaactg

SEQ ID NO: 43801 - DNA, 20 bp, Artificial Sequence
  Synthetic
gtgggaacaatgattaaatg

SEQ ID NO: 43802 - DNA, 20 bp, Artificial Sequence
  Synthetic
ggtgggaacaatgattaaat

SEQ ID NO: 43803 - DNA, 20 bp, Artificial Sequence
  Synthetic
tggtgggaacaatgattaaa

SEQ ID NO: 43804 - DNA, 20 bp, Artificial Sequence
  Synthetic
cagttcaacatcacgctggt

SEQ ID NO: 43805 - DNA, 20 bp, Artificial Sequence
  Synthetic
ccagttcaacatcacgctgg

SEQ ID NO: 43806 - DNA, 20 bp, Artificial Sequence
  Synthetic
ccaccagcgtgatgttgaac

SEQ ID NO: 43807 - DNA, 20 bp, Artificial Sequence
  Synthetic
caccagcgtgatgttgaact

SEQ ID NO: 43808 - DNA, 20 bp, Artificial Sequence
  Synthetic
ctcccagttcaacatcacgc

SEQ ID NO: 43809 - DNA, 20 bp, Artificial Sequence
  Synthetic
cgtgatgttgaactgggaga

SEQ ID NO: 43810 - DNA, 20 bp, Artificial Sequence
  Synthetic
actgggagatggagttgaaa

SEQ ID NO: 43811 - DNA, 20 bp, Artificial Sequence
  Synthetic
gggagatggagttgaaacgg

SEQ ID NO: 43812 - DNA, 20 bp, Artificial Sequence
  Synthetic
aagtgaggattttaaagctg

SEQ ID NO: 43813 - DNA, 20 bp, Artificial Sequence
  Synthetic
taagtgaggattttaaagct

SEQ ID NO: 43814 - DNA, 20 bp, Artificial Sequence
  Synthetic
gtaagtgaggattttaaagc

SEQ ID NO: 43815 - DNA, 20 bp, Artificial Sequence
  Synthetic
tttaaaatcctcacttacta

SEQ ID NO: 43816 - DNA, 20 bp, Artificial Sequence
  Synthetic
tctgggctccatagtaagtg

SEQ ID NO: 43817 - DNA, 20 bp, Artificial Sequence
  Synthetic
actatggagcccagaaagag

SEQ ID NO: 43818 - DNA, 20 bp, Artificial Sequence
  Synthetic
cttgagcttcctctctttct

SEQ ID NO: 43819 - DNA, 20 bp, Artificial Sequence
  Synthetic
gcttgagcttcctctctttc

SEQ ID NO: 43820 - DNA, 20 bp, Artificial Sequence
  Synthetic
agaaagagaggaagctcaag

SEQ ID NO: 43821 - DNA, 20 bp, Artificial Sequence
  Synthetic
agagaggaagctcaagcggc

SEQ ID NO: 43822 - DNA, 20 bp, Artificial Sequence
  Synthetic
cacatgaaaggcattgggct

SEQ ID NO: 43823 - DNA, 20 bp, Artificial Sequence
  Synthetic
atacacacatgaaaggcatt

SEQ ID NO: 43824 - DNA, 20 bp, Artificial Sequence
  Synthetic
gatacacacatgaaaggcat

SEQ ID NO: 43825 - DNA, 20 bp, Artificial Sequence
  Synthetic
agatgtgatacacacatgaa

SEQ ID NO: 43826 - DNA, 20 bp, Artificial Sequence
  Synthetic
gtgtatcacatcttacaagc

SEQ ID NO: 43827 - DNA, 20 bp, Artificial Sequence
  Synthetic
atcttacaagctggtgctgc

SEQ ID NO: 43828 - DNA, 20 bp, Artificial Sequence
  Synthetic
gctggtgctgcaggaccacc

SEQ ID NO: 43829 - DNA, 20 bp, Artificial Sequence
  Synthetic
tcttgcgacggaaggcctgg

SEQ ID NO: 43830 - DNA, 20 bp, Artificial Sequence
  Synthetic
agttcttgcgacggaaggcc

SEQ ID NO: 43831 - DNA, 20 bp, Artificial Sequence
  Synthetic
aggccttccgtcgcaagaac

SEQ ID NO: 43832 - DNA, 20 bp, Artificial Sequence
  Synthetic
gcgccagttcttgcgacgga

SEQ ID NO: 43833 - DNA, 20 bp, Artificial Sequence
  Synthetic
gatagcgccagttcttgcga

SEQ ID NO: 43834 - DNA, 20 bp, Artificial Sequence
  Synthetic
gaactggcgctatctcattc

SEQ ID NO: 43835 - DNA, 20 bp, Artificial Sequence
  Synthetic
gcgctatctcattctggatg

SEQ ID NO: 43836 - DNA, 20 bp, Artificial Sequence
  Synthetic
agaacttcaagtcacagcgc

SEQ ID NO: 43837 - DNA, 20 bp, Artificial Sequence
  Synthetic
agtcactcctcaacttcaac

SEQ ID NO: 43838 - DNA, 20 bp, Artificial Sequence
  Synthetic
cactcctcaacttcaacagg

SEQ ID NO: 43839 - DNA, 20 bp, Artificial Sequence
  Synthetic
atctccacctgttgaagttg

SEQ ID NO: 43840 - DNA, 20 bp, Artificial Sequence
  Synthetic
ctgtcaggagcaggcgtctc

SEQ ID NO: 43841 - DNA, 20 bp, Artificial Sequence
  Synthetic
cagagacgcctgctcctgac

SEQ ID NO: 43842 - DNA, 20 bp, Artificial Sequence
  Synthetic
agggagttcctgtcaggagc

SEQ ID NO: 43843 - DNA, 20 bp, Artificial Sequence
  Synthetic
tctgcaagggagttcctgtc

SEQ ID NO: 43844 - DNA, 20 bp, Artificial Sequence
  Synthetic
tcccttgcagaacagcctca

SEQ ID NO: 43845 - DNA, 20 bp, Artificial Sequence
  Synthetic
tccatgaggctgttctgcaa

SEQ ID NO: 43846 - DNA, 20 bp, Artificial Sequence
  Synthetic
ctccatgaggctgttctgca

SEQ ID NO: 43847 - DNA, 20 bp, Artificial Sequence
  Synthetic
agaacagcctcatggagctg

SEQ ID NO: 43848 - DNA, 20 bp, Artificial Sequence
  Synthetic
tcaaggaccacagctccatg

SEQ ID NO: 43849 - DNA, 20 bp, Artificial Sequence
  Synthetic
gggcatcaaaaagtgcatca

SEQ ID NO: 43850 - DNA, 20 bp, Artificial Sequence
  Synthetic
cgatgagactggaagacatg

SEQ ID NO: 43851 - DNA, 20 bp, Artificial Sequence
  Synthetic
gcgatgagactggaagacat

SEQ ID NO: 43852 - DNA, 20 bp, Artificial Sequence
  Synthetic
cgcgatgagactggaagaca

SEQ ID NO: 43853 - DNA, 20 bp, Artificial Sequence
  Synthetic
ccttgaactcgcgatgagac

SEQ ID NO: 43854 - DNA, 20 bp, Artificial Sequence
  Synthetic
ccagtctcatcgcgagttca

SEQ ID NO: 43855 - DNA, 20 bp, Artificial Sequence
  Synthetic
ctcatcgcgagttcaaggag

SEQ ID NO: 43856 - DNA, 20 bp, Artificial Sequence
  Synthetic
tggttctctaatcccctaac

SEQ ID NO: 43857 - DNA, 20 bp, Artificial Sequence
  Synthetic
tcccctaactggcatgattg

SEQ ID NO: 43858 - DNA, 20 bp, Artificial Sequence
  Synthetic
ccctcaatcatgccagttag

SEQ ID NO: 43859 - DNA, 20 bp, Artificial Sequence
  Synthetic
cccctaactggcatgattga

SEQ ID NO: 43860 - DNA, 20 bp, Artificial Sequence
  Synthetic
gccctcaatcatgccagtta

SEQ ID NO: 43861 - DNA, 20 bp, Artificial Sequence
  Synthetic
tgccctcaatcatgccagtt

SEQ ID NO: 43862 - DNA, 20 bp, Artificial Sequence
  Synthetic
ggcagccaagagtataatga

SEQ ID NO: 43863 - DNA, 20 bp, Artificial Sequence
  Synthetic
ctagaccttcattatactct

SEQ ID NO: 43864 - DNA, 20 bp, Artificial Sequence
  Synthetic
tctagtcaaacgcctccaca

SEQ ID NO: 43865 - DNA, 20 bp, Artificial Sequence
  Synthetic
gtcaaacgcctccacaaggt

SEQ ID NO: 43866 - DNA, 20 bp, Artificial Sequence
  Synthetic
ttgcaggccctaccttgtgg

SEQ ID NO: 43867 - DNA, 20 bp, Artificial Sequence
  Synthetic
ctgttgcaggccctaccttg

SEQ ID NO: 43868 - DNA, 20 bp, Artificial Sequence
  Synthetic
taatttgcttttaggttttg

SEQ ID NO: 43869 - DNA, 20 bp, Artificial Sequence
  Synthetic
ttaactcggcgcagtaaaaa

SEQ ID NO: 43870 - DNA, 20 bp, Artificial Sequence
  Synthetic
ttttttactgcgccgagtta

SEQ ID NO: 43871 - DNA, 20 bp, Artificial Sequence
  Synthetic
tttactgcgccgagttaagg

SEQ ID NO: 43872 - DNA, 20 bp, Artificial Sequence
  Synthetic
tctcaacatccaccttaact

SEQ ID NO: 43873 - DNA, 20 bp, Artificial Sequence
  Synthetic
ataacatgctcgtacttttt

SEQ ID NO: 43874 - DNA, 20 bp, Artificial Sequence
  Synthetic
gataacatgctcgtactttt

SEQ ID NO: 43875 - DNA, 20 bp, Artificial Sequence
  Synthetic
acgagcatgttatccgctgc

SEQ ID NO: 43876 - DNA, 20 bp, Artificial Sequence
  Synthetic
gacgcttggagagcctgcag

SEQ ID NO: 43877 - DNA, 20 bp, Artificial Sequence
  Synthetic
atagagacagcgttgacgct

SEQ ID NO: 43878 - DNA, 20 bp, Artificial Sequence
  Synthetic
ctgtctctatgatgacttca

SEQ ID NO: 43879 - DNA, 20 bp, Artificial Sequence
  Synthetic
ttcctctttccccagaacta

SEQ ID NO: 43880 - DNA, 20 bp, Artificial Sequence
  Synthetic
ggctagtgtctccttagttc

SEQ ID NO: 43881 - DNA, 20 bp, Artificial Sequence
  Synthetic
actaaggagacactagccac

SEQ ID NO: 43882 - DNA, 20 bp, Artificial Sequence
  Synthetic
gacgctcatgaaatggcctg

SEQ ID NO: 43883 - DNA, 20 bp, Artificial Sequence
  Synthetic
tgttgatgacgctcatgaaa

SEQ ID NO: 43884 - DNA, 20 bp, Artificial Sequence
  Synthetic
ggtcgagggtcgaacagatt

SEQ ID NO: 43885 - DNA, 20 bp, Artificial Sequence
  Synthetic
gcacggatgatgggcgtggc

SEQ ID NO: 43886 - DNA, 20 bp, Artificial Sequence
  Synthetic
cacggatgatgggcgtggct

SEQ ID NO: 43887 - DNA, 20 bp, Artificial Sequence
  Synthetic
acggatgatgggcgtggctg

SEQ ID NO: 43888 - DNA, 20 bp, Artificial Sequence
  Synthetic
tggctggggcgtccgcaccc

SEQ ID NO: 43889 - DNA, 20 bp, Artificial Sequence
  Synthetic
tgcgaatcttctccagggtg

SEQ ID NO: 43890 - DNA, 20 bp, Artificial Sequence
  Synthetic
gttcttgcgaatcttctcca

SEQ ID NO: 43891 - DNA, 20 bp, Artificial Sequence
  Synthetic
tgttcttgcgaatcttctcc

SEQ ID NO: 43892 - DNA, 20 bp, Artificial Sequence
  Synthetic
tcgcaagaacagcttcgtca

SEQ ID NO: 43893 - DNA, 20 bp, Artificial Sequence
  Synthetic
cagcttcgtcatggagtacg

SEQ ID NO: 43894 - DNA, 20 bp, Artificial Sequence
  Synthetic
agcttcgtcatggagtacgt

SEQ ID NO: 43895 - DNA, 20 bp, Artificial Sequence
  Synthetic
cgtcatggagtacgtgggag

SEQ ID NO: 43896 - DNA, 20 bp, Artificial Sequence
  Synthetic
atggagtacgtgggagaggt

SEQ ID NO: 43897 - DNA, 20 bp, Artificial Sequence
  Synthetic
tccctagatcattacctcag

SEQ ID NO: 43898 - DNA, 20 bp, Artificial Sequence
  Synthetic
ctagatcattacctcagagg

SEQ ID NO: 43899 - DNA, 20 bp, Artificial Sequence
  Synthetic
ttacctcagaggaggcagag

SEQ ID NO: 43900 - DNA, 20 bp, Artificial Sequence
  Synthetic
ccgccgctctgcctcctctg

SEQ ID NO: 43901 - DNA, 20 bp, Artificial Sequence
  Synthetic
cctcagaggaggcagagcgg

SEQ ID NO: 43902 - DNA, 20 bp, Artificial Sequence
  Synthetic
ctcagaggaggcagagcggc

SEQ ID NO: 43903 - DNA, 20 bp, Artificial Sequence
  Synthetic
tcagaggaggcagagcggcg

SEQ ID NO: 43904 - DNA, 20 bp, Artificial Sequence
  Synthetic
gggccagatctacgaccgtc

SEQ ID NO: 43905 - DNA, 20 bp, Artificial Sequence
  Synthetic
ggccagatctacgaccgtca

SEQ ID NO: 43906 - DNA, 20 bp, Artificial Sequence
  Synthetic
cgccctgacggtcgtagatc

SEQ ID NO: 43907 - DNA, 20 bp, Artificial Sequence
  Synthetic
agaggtaggtggcgccctga

SEQ ID NO: 43908 - DNA, 20 bp, Artificial Sequence
  Synthetic
cgccacctacctctttgacc

SEQ ID NO: 43909 - DNA, 20 bp, Artificial Sequence
  Synthetic
gtccaggtcaaagaggtagg

SEQ ID NO: 43910 - DNA, 20 bp, Artificial Sequence
  Synthetic
gtagtccaggtcaaagaggt

SEQ ID NO: 43911 - DNA, 20 bp, Artificial Sequence
  Synthetic
ccacgtagtccaggtcaaag

SEQ ID NO: 43912 - DNA, 20 bp, Artificial Sequence
  Synthetic
cctctttgacctggactacg

SEQ ID NO: 43913 - DNA, 20 bp, Artificial Sequence
  Synthetic
ctttgacctggactacgtgg

SEQ ID NO: 43914 - DNA, 20 bp, Artificial Sequence
  Synthetic
acacgtcctccacgtagtcc

SEQ ID NO: 43915 - DNA, 20 bp, Artificial Sequence
  Synthetic
cgtggaggacgtgtacaccg

SEQ ID NO: 43916 - DNA, 20 bp, Artificial Sequence
  Synthetic
accgtggatgccgcctacta

SEQ ID NO: 43917 - DNA, 20 bp, Artificial Sequence
  Synthetic
gccatagtaggcggcatcca

SEQ ID NO: 43918 - DNA, 20 bp, Artificial Sequence
  Synthetic
ggagatgttgccatagtagg

SEQ ID NO: 43919 - DNA, 20 bp, Artificial Sequence
  Synthetic
gtgggagatgttgccatagt

SEQ ID NO: 43920 - DNA, 20 bp, Artificial Sequence
  Synthetic
cacactgtggttgacaaagt

SEQ ID NO: 43921 - DNA, 20 bp, Artificial Sequence
  Synthetic
ccacactgtggttgacaaag

SEQ ID NO: 43922 - DNA, 20 bp, Artificial Sequence
  Synthetic
ccactttgtcaaccacagtg

SEQ ID NO: 43923 - DNA, 20 bp, Artificial Sequence
  Synthetic
cactttgtcaaccacagtgt

SEQ ID NO: 43924 - DNA, 20 bp, Artificial Sequence
  Synthetic
tgccgggggtacccacactg

SEQ ID NO: 43925 - DNA, 20 bp, Artificial Sequence
  Synthetic
cctgcaggttggggtcacac

SEQ ID NO: 43926 - DNA, 20 bp, Artificial Sequence
  Synthetic
ccagtgtgaccccaacctgc

SEQ ID NO: 43927 - DNA, 20 bp, Artificial Sequence
  Synthetic
cgttgtacacctgcaggttg

SEQ ID NO: 43928 - DNA, 20 bp, Artificial Sequence
  Synthetic
acgttgtacacctgcaggtt

SEQ ID NO: 43929 - DNA, 20 bp, Artificial Sequence
  Synthetic
gacgttgtacacctgcaggt

SEQ ID NO: 43930 - DNA, 20 bp, Artificial Sequence
  Synthetic
tgaagacgttgtacacctgc

SEQ ID NO: 43931 - DNA, 20 bp, Artificial Sequence
  Synthetic
tcatagacaaccttgacgag

SEQ ID NO: 43932 - DNA, 20 bp, Artificial Sequence
  Synthetic
tgcggggcagccgctcgtca

SEQ ID NO: 43933 - DNA, 20 bp, Artificial Sequence
  Synthetic
gtggcaaagaaagcgatgcg

SEQ ID NO: 43934 - DNA, 20 bp, Artificial Sequence
  Synthetic
tgtggcaaagaaagcgatgc

SEQ ID NO: 43935 - DNA, 20 bp, Artificial Sequence
  Synthetic
ttgtggcaaagaaagcgatg

SEQ ID NO: 43936 - DNA, 20 bp, Artificial Sequence
  Synthetic
tctttgccacaagaaccatc

SEQ ID NO: 43937 - DNA, 20 bp, Artificial Sequence
  Synthetic
ctttgccacaagaaccatcc

SEQ ID NO: 43938 - DNA, 20 bp, Artificial Sequence
  Synthetic
gccacaagaaccatccgggc

SEQ ID NO: 43939 - DNA, 20 bp, Artificial Sequence
  Synthetic
gcctgcccggatggttcttg

SEQ ID NO: 43940 - DNA, 20 bp, Artificial Sequence
  Synthetic
aagaaccatccgggcaggcg

SEQ ID NO: 43941 - DNA, 20 bp, Artificial Sequence
  Synthetic
gagctcctcgcctgcccgga

SEQ ID NO: 43942 - DNA, 20 bp, Artificial Sequence
  Synthetic
aggtgagctcctcgcctgcc

SEQ ID NO: 43943 - DNA, 20 bp, Artificial Sequence
  Synthetic
accttgcatgttgtaatcaa

SEQ ID NO: 43944 - DNA, 20 bp, Artificial Sequence
  Synthetic
ggatcttcttgtaatcgcac

SEQ ID NO: 43945 - DNA, 20 bp, Artificial Sequence
  Synthetic
tacccacccccaacaggaac

SEQ ID NO: 43946 - DNA, 20 bp, Artificial Sequence
  Synthetic
acaggaacaggaatattacc

SEQ ID NO: 43947 - DNA, 20 bp, Artificial Sequence
  Synthetic
aggaatattacctggtgaaa

SEQ ID NO: 43948 - DNA, 20 bp, Artificial Sequence
  Synthetic
tattacctggtgaaatggcg

SEQ ID NO: 43949 - DNA, 20 bp, Artificial Sequence
  Synthetic
gatatccacgccatttcacc

SEQ ID NO: 43950 - DNA, 20 bp, Artificial Sequence
  Synthetic
atccagactcagagagcacc

SEQ ID NO: 43951 - DNA, 20 bp, Artificial Sequence
  Synthetic
tccagactcagagagcacct

SEQ ID NO: 43952 - DNA, 20 bp, Artificial Sequence
  Synthetic
tcccaggtgctctctgagtc

SEQ ID NO: 43953 - DNA, 20 bp, Artificial Sequence
  Synthetic
cagagagcacctgggagcca

SEQ ID NO: 43954 - DNA, 20 bp, Artificial Sequence
  Synthetic
gagattctgccgtggctccc

SEQ ID NO: 43955 - DNA, 20 bp, Artificial Sequence
  Synthetic
acacacttgagattctgccg

SEQ ID NO: 43956 - DNA, 20 bp, Artificial Sequence
  Synthetic
tatcctcaagcagttccaca

SEQ ID NO: 43957 - DNA, 20 bp, Artificial Sequence
  Synthetic
agtccttgtggaactgcttg

SEQ ID NO: 43958 - DNA, 20 bp, Artificial Sequence
  Synthetic
gctccctttctaagtccttg

SEQ ID NO: 43959 - DNA, 20 bp, Artificial Sequence
  Synthetic
caatgccaagcgcagccatc

SEQ ID NO: 43960 - DNA, 20 bp, Artificial Sequence
  Synthetic
aatgccaagcgcagccatct

SEQ ID NO: 43961 - DNA, 20 bp, Artificial Sequence
  Synthetic
gcgtcccagatggctgcgct

SEQ ID NO: 43962 - DNA, 20 bp, Artificial Sequence
  Synthetic
ctacagtgatgcgtcccaga

SEQ ID NO: 43963 - DNA, 20 bp, Artificial Sequence
  Synthetic
acgcatcactgtagagaatg

SEQ ID NO: 43964 - DNA, 20 bp, Artificial Sequence
  Synthetic
catcactgtagagaatgagg

SEQ ID NO: 43965 - DNA, 20 bp, Artificial Sequence
  Synthetic
tgtagagaatgaggtggacc

SEQ ID NO: 43966 - DNA, 20 bp, Artificial Sequence
  Synthetic
gagaatgaggtggacctgga

SEQ ID NO: 43967 - DNA, 20 bp, Artificial Sequence
  Synthetic
tggacctggacggccctccg

SEQ ID NO: 43968 - DNA, 20 bp, Artificial Sequence
  Synthetic
ggacctggacggccctccgc

SEQ ID NO: 43969 - DNA, 20 bp, Artificial Sequence
  Synthetic
aggcccgcggagggccgtcc

SEQ ID NO: 43970 - DNA, 20 bp, Artificial Sequence
  Synthetic
tgtacacgaaggcccgcgga

SEQ ID NO: 43971 - DNA, 20 bp, Artificial Sequence
  Synthetic
atgtacacgaaggcccgcgg

SEQ ID NO: 43972 - DNA, 20 bp, Artificial Sequence
  Synthetic
ttgatgtacacgaaggcccg

SEQ ID NO: 43973 - DNA, 20 bp, Artificial Sequence
  Synthetic
gtactcattgatgtacacga

SEQ ID NO: 43974 - DNA, 20 bp, Artificial Sequence
  Synthetic
tacatcaatgagtaccgtgt

SEQ ID NO: 43975 - DNA, 20 bp, Artificial Sequence
  Synthetic
caatgagtaccgtgttggtg

SEQ ID NO: 43976 - DNA, 20 bp, Artificial Sequence
  Synthetic
aatgagtaccgtgttggtga

SEQ ID NO: 43977 - DNA, 20 bp, Artificial Sequence
  Synthetic
gggtgatgccctcaccaaca

SEQ ID NO: 43978 - DNA, 20 bp, Artificial Sequence
  Synthetic
tgagggcatcaccctcaacc

SEQ ID NO: 43979 - DNA, 20 bp, Artificial Sequence
  Synthetic
gggcatcaccctcaaccagg

SEQ ID NO: 43980 - DNA, 20 bp, Artificial Sequence
  Synthetic
caccctcaaccaggtggctg

SEQ ID NO: 43981 - DNA, 20 bp, Artificial Sequence
  Synthetic
accctcaaccaggtggctgt

SEQ ID NO: 43982 - DNA, 20 bp, Artificial Sequence
  Synthetic
gcccacagccacctggttga

SEQ ID NO: 43983 - DNA, 20 bp, Artificial Sequence
  Synthetic
agcccacagccacctggttg

SEQ ID NO: 43984 - DNA, 20 bp, Artificial Sequence
  Synthetic
actcgcagcccacagccacc

SEQ ID NO: 43985 - DNA, 20 bp, Artificial Sequence
  Synthetic
ggctgtgggctgcgagtgcc

SEQ ID NO: 43986 - DNA, 20 bp, Artificial Sequence
  Synthetic
gcgagtgccaggactgtctg

SEQ ID NO: 43987 - DNA, 20 bp, Artificial Sequence
  Synthetic
cgagtgccaggactgtctgt

SEQ ID NO: 43988 - DNA, 20 bp, Artificial Sequence
  Synthetic
tgggtgcccacagacagtcc

SEQ ID NO: 43989 - DNA, 20 bp, Artificial Sequence
  Synthetic
gactgtctgtgggcacccac

SEQ ID NO: 43990 - DNA, 20 bp, Artificial Sequence
  Synthetic
tgtctgtgggcacccactgg

SEQ ID NO: 43991 - DNA, 20 bp, Artificial Sequence
  Synthetic
acccactggaggctgctgcc

SEQ ID NO: 43992 - DNA, 20 bp, Artificial Sequence
  Synthetic
cccgggcagcagcctccagt

SEQ ID NO: 43993 - DNA, 20 bp, Artificial Sequence
  Synthetic
cccactggaggctgctgccc

SEQ ID NO: 43994 - DNA, 20 bp, Artificial Sequence
  Synthetic
ccccgggcagcagcctccag

SEQ ID NO: 43995 - DNA, 20 bp, Artificial Sequence
  Synthetic
ccactggaggctgctgcccg

SEQ ID NO: 43996 - DNA, 20 bp, Artificial Sequence
  Synthetic
cactggaggctgctgcccgg

SEQ ID NO: 43997 - DNA, 20 bp, Artificial Sequence
  Synthetic
acttgtgcagtgacgccccc

SEQ ID NO: 43998 - DNA, 20 bp, Artificial Sequence
  Synthetic
aacttgtgcagtgacgcccc

SEQ ID NO: 43999 - DNA, 20 bp, Artificial Sequence
  Synthetic
caagtttgcctacaatgacc

SEQ ID NO: 44000 - DNA, 20 bp, Artificial Sequence
  Synthetic
aagtttgcctacaatgacca

SEQ ID NO: 44001 - DNA, 20 bp, Artificial Sequence
  Synthetic
tgcctacaatgaccagggcc

SEQ ID NO: 44002 - DNA, 20 bp, Artificial Sequence
  Synthetic
cacctggccctggtcattgt

SEQ ID NO: 44003 - DNA, 20 bp, Artificial Sequence
  Synthetic
acaatgaccagggccaggtg

SEQ ID NO: 44004 - DNA, 20 bp, Artificial Sequence
  Synthetic
ctcgaagccgcacctggccc

SEQ ID NO: 44005 - DNA, 20 bp, Artificial Sequence
  Synthetic
ggccaggtgcggcttcgagc

SEQ ID NO: 44006 - DNA, 20 bp, Artificial Sequence
  Synthetic
gccaggtgcggcttcgagcc

SEQ ID NO: 44007 - DNA, 20 bp, Artificial Sequence
  Synthetic
gcccggctcgaagccgcacc

SEQ ID NO: 44008 - DNA, 20 bp, Artificial Sequence
  Synthetic
gcactcgtagatgggcagcc

SEQ ID NO: 44009 - DNA, 20 bp, Artificial Sequence
  Synthetic
cgggagttgcactcgtagat

SEQ ID NO: 44010 - DNA, 20 bp, Artificial Sequence
  Synthetic
gcgggagttgcactcgtaga

SEQ ID NO: 44011 - DNA, 20 bp, Artificial Sequence
  Synthetic
tgcaactcccgctgccgctg

SEQ ID NO: 44012 - DNA, 20 bp, Artificial Sequence
  Synthetic
gtcatagccgcagcggcagc

SEQ ID NO: 44013 - DNA, 20 bp, Artificial Sequence
  Synthetic
agtcatagccgcagcggcag

SEQ ID NO: 44014 - DNA, 20 bp, Artificial Sequence
  Synthetic
ttgggcagtcatagccgcag

SEQ ID NO: 44015 - DNA, 20 bp, Artificial Sequence
  Synthetic
ctatgactgcccaaatcgtg

SEQ ID NO: 44016 - DNA, 20 bp, Artificial Sequence
  Synthetic
ccttctgtaccacacgattt

SEQ ID NO: 44017 - DNA, 20 bp, Artificial Sequence
  Synthetic
cccttctgtaccacacgatt

SEQ ID NO: 44018 - DNA, 20 bp, Artificial Sequence
  Synthetic
gaactagcaatggacgtggc

SEQ ID NO: 44019 - DNA, 20 bp, Artificial Sequence
  Synthetic
aactagcaatggacgtggct

SEQ ID NO: 44020 - DNA, 20 bp, Artificial Sequence
  Synthetic
actagcaatggacgtggctg

SEQ ID NO: 44021 - DNA, 20 bp, Artificial Sequence
  Synthetic
cattcttttaatcttcacaa

SEQ ID NO: 44022 - DNA, 20 bp, Artificial Sequence
  Synthetic
tcattcttttaatcttcaca

SEQ ID NO: 44023 - DNA, 20 bp, Artificial Sequence
  Synthetic
taaaagaatgagttttgtca

SEQ ID NO: 44024 - DNA, 20 bp, Artificial Sequence
  Synthetic
agttttgtcatggaatatgt

SEQ ID NO: 44025 - DNA, 20 bp, Artificial Sequence
  Synthetic
tgtcatggaatatgttggag

SEQ ID NO: 44026 - DNA, 20 bp, Artificial Sequence
  Synthetic
agtgaagaagctgaaagacg

SEQ ID NO: 44027 - DNA, 20 bp, Artificial Sequence
  Synthetic
aggacagttctatgacaaca

SEQ ID NO: 44028 - DNA, 20 bp, Artificial Sequence
  Synthetic
ggacagttctatgacaacaa

SEQ ID NO: 44029 - DNA, 20 bp, Artificial Sequence
  Synthetic
aatcacgtatctctttgatc

SEQ ID NO: 44030 - DNA, 20 bp, Artificial Sequence
  Synthetic
tgagtctgatgaattcacag

SEQ ID NO: 44031 - DNA, 20 bp, Artificial Sequence
  Synthetic
tgatgaattcacagtggatg

SEQ ID NO: 44032 - DNA, 20 bp, Artificial Sequence
  Synthetic
acagtggatgcggctcgata

SEQ ID NO: 44033 - DNA, 20 bp, Artificial Sequence
  Synthetic
ttagtgtgacccaaatcttc

SEQ ID NO: 44034 - DNA, 20 bp, Artificial Sequence
  Synthetic
cattgaacacctgaagattt

SEQ ID NO: 44035 - DNA, 20 bp, Artificial Sequence
  Synthetic
acattgaacacctgaagatt

SEQ ID NO: 44036 - DNA, 20 bp, Artificial Sequence
  Synthetic
ttcggggaagacgagtatcg

SEQ ID NO: 44037 - DNA, 20 bp, Artificial Sequence
  Synthetic
gtggaaaacaatgctattcg

SEQ ID NO: 44038 - DNA, 20 bp, Artificial Sequence
  Synthetic
tgtggaaaacaatgctattc

SEQ ID NO: 44039 - DNA, 20 bp, Artificial Sequence
  Synthetic
ttgtggaaaacaatgctatt

SEQ ID NO: 44040 - DNA, 20 bp, Artificial Sequence
  Synthetic
tccacaagaaccataaatgc

SEQ ID NO: 44041 - DNA, 20 bp, Artificial Sequence
  Synthetic
tccagcatttatggttcttg

SEQ ID NO: 44042 - DNA, 20 bp, Artificial Sequence
  Synthetic
cagctcttctccagcattta

SEQ ID NO: 44043 - DNA, 20 bp, Artificial Sequence
  Synthetic
aaggaatctaaacaattatg

SEQ ID NO: 44044 - DNA, 20 bp, Artificial Sequence
  Synthetic
gaatctaaacaattatgagg

SEQ ID NO: 44045 - DNA, 20 bp, Artificial Sequence
  Synthetic
ggaatacttgtgtgactaca

SEQ ID NO: 44046 - DNA, 20 bp, Artificial Sequence
  Synthetic
gtgtgactacaaggtagtaa

SEQ ID NO: 44047 - DNA, 20 bp, Artificial Sequence
  Synthetic
tcttttgtattttaaggata

SEQ ID NO: 44048 - DNA, 20 bp, Artificial Sequence
  Synthetic
tggaatattatcttgtaaaa

SEQ ID NO: 44049 - DNA, 20 bp, Artificial Sequence
  Synthetic
tattatcttgtaaaatggaa

SEQ ID NO: 44050 - DNA, 20 bp, Artificial Sequence
  Synthetic
atcttgtaaaatggaaagga

SEQ ID NO: 44051 - DNA, 20 bp, Artificial Sequence
  Synthetic
ggccagattctacaaatact

SEQ ID NO: 44052 - DNA, 20 bp, Artificial Sequence
  Synthetic
gccagattctacaaatactt

SEQ ID NO: 44053 - DNA, 20 bp, Artificial Sequence
  Synthetic
tcccaagtatttgtagaatc

SEQ ID NO: 44054 - DNA, 20 bp, Artificial Sequence
  Synthetic
gggcacttcagattttgcaa

SEQ ID NO: 44055 - DNA, 20 bp, Artificial Sequence
  Synthetic
agaattgctgaagcagtaac

SEQ ID NO: 44056 - DNA, 20 bp, Artificial Sequence
  Synthetic
gagaattgctgaagcagtaa

SEQ ID NO: 44057 - DNA, 20 bp, Artificial Sequence
  Synthetic
aacagaagaaagaatcataa

SEQ ID NO: 44058 - DNA, 20 bp, Artificial Sequence
  Synthetic
tgaaaatactgttgatttag

SEQ ID NO: 44059 - DNA, 20 bp, Artificial Sequence
  Synthetic
gaaaatactgttgatttaga

SEQ ID NO: 44060 - DNA, 20 bp, Artificial Sequence
  Synthetic
tgtaatagaagtctgaaggt

SEQ ID NO: 44061 - DNA, 20 bp, Artificial Sequence
  Synthetic
atgtaatagaagtctgaagg

SEQ ID NO: 44062 - DNA, 20 bp, Artificial Sequence
  Synthetic
ttaatgtaatagaagtctga

SEQ ID NO: 44063 - DNA, 20 bp, Artificial Sequence
  Synthetic
aacgaatacaaaccagctcc

SEQ ID NO: 44064 - DNA, 20 bp, Artificial Sequence
  Synthetic
actaagctgattccaggagc

SEQ ID NO: 44065 - DNA, 20 bp, Artificial Sequence
  Synthetic
tcattgactaagctgattcc

SEQ ID NO: 44066 - DNA, 20 bp, Artificial Sequence
  Synthetic
ttagtcaatgaagctacctt

SEQ ID NO: 44067 - DNA, 20 bp, Artificial Sequence
  Synthetic
atctgtgcatgaacaaccaa

SEQ ID NO: 44068 - DNA, 20 bp, Artificial Sequence
  Synthetic
aaatgttgtcctgctgaagc

SEQ ID NO: 44069 - DNA, 20 bp, Artificial Sequence
  Synthetic
aaaagaactccagcttcagc

SEQ ID NO: 44070 - DNA, 20 bp, Artificial Sequence
  Synthetic
tgctgaagctggagttcttt

SEQ ID NO: 44071 - DNA, 20 bp, Artificial Sequence
  Synthetic
caggtgggattttaatttgt

SEQ ID NO: 44072 - DNA, 20 bp, Artificial Sequence
  Synthetic
caacaaattaaaatcccacc

SEQ ID NO: 44073 - DNA, 20 bp, Artificial Sequence
  Synthetic
catagatgggagtaccaggt

SEQ ID NO: 44074 - DNA, 20 bp, Artificial Sequence
  Synthetic
tcatagatgggagtaccagg

SEQ ID NO: 44075 - DNA, 20 bp, Artificial Sequence
  Synthetic
cattcatagatgggagtacc

SEQ ID NO: 44076 - DNA, 20 bp, Artificial Sequence
  Synthetic
cttgagttgcattcatagat

SEQ ID NO: 44077 - DNA, 20 bp, Artificial Sequence
  Synthetic
ccttgagttgcattcataga

SEQ ID NO: 44078 - DNA, 20 bp, Artificial Sequence
  Synthetic
ccatctatgaatgcaactca

SEQ ID NO: 44079 - DNA, 20 bp, Artificial Sequence
  Synthetic
tgcaactcaaggtgtcagtg

SEQ ID NO: 44080 - DNA, 20 bp, Artificial Sequence
  Synthetic
gtggtcctgattgtcccaat

SEQ ID NO: 44081 - DNA, 20 bp, Artificial Sequence
  Synthetic
acaatcctattgggacaatc

SEQ ID NO: 44082 - DNA, 20 bp, Artificial Sequence
  Synthetic
cctttttgtacaatcctatt

SEQ ID NO: 44083 - DNA, 20 bp, Artificial Sequence
  Synthetic
gcctttttgtacaatcctat

SEQ ID NO: 44084 - DNA, 20 bp, Artificial Sequence
  Synthetic
caatgcaatgaactcacatt

SEQ ID NO: 44085 - DNA, 20 bp, Artificial Sequence
  Synthetic
cattgactggagtgtggaaa

SEQ ID NO: 44086 - DNA, 20 bp, Artificial Sequence
  Synthetic
gcattgactggagtgtggaa

SEQ ID NO: 44087 - DNA, 20 bp, Artificial Sequence
  Synthetic
cctttgcattgactggagtg

SEQ ID NO: 44088 - DNA, 20 bp, Artificial Sequence
  Synthetic
ccacactccagtcaatgcaa

SEQ ID NO: 44089 - DNA, 20 bp, Artificial Sequence
  Synthetic
tttacaacctttgcattgac

SEQ ID NO: 44090 - DNA, 20 bp, Artificial Sequence
  Synthetic
agtcaatgcaaaggttgtaa

SEQ ID NO: 44091 - DNA, 20 bp, Artificial Sequence
  Synthetic
actactacaaaatcatcact

SEQ ID NO: 44092 - DNA, 20 bp, Artificial Sequence
  Synthetic
caaaatcatcactcggccaa

SEQ ID NO: 44093 - DNA, 20 bp, Artificial Sequence
  Synthetic
cggagtgtttgtaggtccat

SEQ ID NO: 44094 - DNA, 20 bp, Artificial Sequence
  Synthetic
cgttttcgcggagtgtttgt

SEQ ID NO: 44095 - DNA, 20 bp, Artificial Sequence
  Synthetic
ggcgtttacgcacgttttcg

SEQ ID NO: 44096 - DNA, 20 bp, Artificial Sequence
  Synthetic
gtaaacgcctctacccatct

SEQ ID NO: 44097 - DNA, 20 bp, Artificial Sequence
  Synthetic
taaacgcctctacccatctc

SEQ ID NO: 44098 - DNA, 20 bp, Artificial Sequence
  Synthetic
actcttcccgagatgggtag

SEQ ID NO: 44099 - DNA, 20 bp, Artificial Sequence
  Synthetic
ctctgaactcttcccgagat

SEQ ID NO: 44100 - DNA, 20 bp, Artificial Sequence
  Synthetic
tctctgaactcttcccgaga

SEQ ID NO: 44101 - DNA, 20 bp, Artificial Sequence
  Synthetic
ggaagagttcagagagcatc

SEQ ID NO: 44102 - DNA, 20 bp, Artificial Sequence
  Synthetic
aaaaatagtgcaacctacaa

SEQ ID NO: 44103 - DNA, 20 bp, Artificial Sequence
  Synthetic
catttgattcttaccattgt

SEQ ID NO: 44104 - DNA, 20 bp, Artificial Sequence
  Synthetic
atctgagtcaatgagtgttt

SEQ ID NO: 44105 - DNA, 20 bp, Artificial Sequence
  Synthetic
cattgtcacccagaaaatga

SEQ ID NO: 44106 - DNA, 20 bp, Artificial Sequence
  Synthetic
tggaactgccatcattttct

SEQ ID NO: 44107 - DNA, 20 bp, Artificial Sequence
  Synthetic
ctggaactgccatcattttc

SEQ ID NO: 44108 - DNA, 20 bp, Artificial Sequence
  Synthetic
gcacagagacagcttacatc

SEQ ID NO: 44109 - DNA, 20 bp, Artificial Sequence
  Synthetic
ttattaactgggtgatgaaa

SEQ ID NO: 44110 - DNA, 20 bp, Artificial Sequence
  Synthetic
gaacaaatttcttattaact

SEQ ID NO: 44111 - DNA, 20 bp, Artificial Sequence
  Synthetic
ggaacaaatttcttattaac

SEQ ID NO: 44112 - DNA, 20 bp, Artificial Sequence
  Synthetic
acaatcactttgtaataatc

SEQ ID NO: 44113 - DNA, 20 bp, Artificial Sequence
  Synthetic
caaagtgattgtcaatccaa

SEQ ID NO: 44114 - DNA, 20 bp, Artificial Sequence
  Synthetic
cgtatggtctctaaatccat

SEQ ID NO: 44115 - DNA, 20 bp, Artificial Sequence
  Synthetic
ggatttagagaccatacgta

SEQ ID NO: 44116 - DNA, 20 bp, Artificial Sequence
  Synthetic
tcactcactcaccttacgta

SEQ ID NO: 44117 - DNA, 20 bp, Artificial Sequence
  Synthetic
ccgactctgatacttgtgct

SEQ ID NO: 44118 - DNA, 20 bp, Artificial Sequence
  Synthetic
ccaagcacaagtatcagagt

SEQ ID NO: 44119 - DNA, 20 bp, Artificial Sequence
  Synthetic
caagcacaagtatcagagtc

SEQ ID NO: 44120 - DNA, 20 bp, Artificial Sequence
  Synthetic
tcagagtcgggagagctttc

SEQ ID NO: 44121 - DNA, 20 bp, Artificial Sequence
  Synthetic
ggatgatgtaaaccttattc

SEQ ID NO: 44122 - DNA, 20 bp, Artificial Sequence
  Synthetic
taacactgttggccagaata

SEQ ID NO: 44123 - DNA, 20 bp, Artificial Sequence
  Synthetic
gccaacagtgttaagtataa

SEQ ID NO: 44124 - DNA, 20 bp, Artificial Sequence
  Synthetic
accattatacttaacactgt

SEQ ID NO: 44125 - DNA, 20 bp, Artificial Sequence
  Synthetic
aacagtgttaagtataatgg

SEQ ID NO: 44126 - DNA, 20 bp, Artificial Sequence
  Synthetic
acagtgttaagtataatggt

SEQ ID NO: 44127 - DNA, 20 bp, Artificial Sequence
  Synthetic
gtcttagtatactgactctc

SEQ ID NO: 44128 - DNA, 20 bp, Artificial Sequence
  Synthetic
tcagtatactaagactgccc

SEQ ID NO: 44129 - DNA, 20 bp, Artificial Sequence
  Synthetic
acagacgttcacaatctcct

SEQ ID NO: 44130 - DNA, 20 bp, Artificial Sequence
  Synthetic
aacagacgttcacaatctcc

SEQ ID NO: 44131 - DNA, 20 bp, Artificial Sequence
  Synthetic
cattgtcacccagaaaatga

SEQ ID NO: 44132 - DNA, 20 bp, Artificial Sequence
  Synthetic
tggaactgccatcattttct

SEQ ID NO: 44133 - DNA, 20 bp, Artificial Sequence
  Synthetic
ctggaactgccatcattttc

SEQ ID NO: 44134 - DNA, 20 bp, Artificial Sequence
  Synthetic
tgatggcagttccagattct

SEQ ID NO: 44135 - DNA, 20 bp, Artificial Sequence
  Synthetic
tgatgaaatggccaagaatc

SEQ ID NO: 44136 - DNA, 20 bp, Artificial Sequence
  Synthetic
ttattaactgggtgatgaaa

SEQ ID NO: 44137 - DNA, 20 bp, Artificial Sequence
  Synthetic
gaacaaacttcttattaact

SEQ ID NO: 44138 - DNA, 20 bp, Artificial Sequence
  Synthetic
ggaacaaacttcttattaac

SEQ ID NO: 44139 - DNA, 20 bp, Artificial Sequence
  Synthetic
acaatcattttgtaataatc

SEQ ID NO: 44140 - DNA, 20 bp, Artificial Sequence
  Synthetic
caaaatgattgtcaatccag

SEQ ID NO: 44141 - DNA, 20 bp, Artificial Sequence
  Synthetic
cgtatggtctctaaatccac

SEQ ID NO: 44142 - DNA, 20 bp, Artificial Sequence
  Synthetic
cttggagatgttcttacgta

SEQ ID NO: 44143 - DNA, 20 bp, Artificial Sequence
  Synthetic
ccgactctgatacttgtgct

SEQ ID NO: 44144 - DNA, 20 bp, Artificial Sequence
  Synthetic
ccaagcacaagtatcagagt

SEQ ID NO: 44145 - DNA, 20 bp, Artificial Sequence
  Synthetic
caagcacaagtatcagagtc

SEQ ID NO: 44146 - DNA, 20 bp, Artificial Sequence
  Synthetic
taacactgttggcaagaata

SEQ ID NO: 44147 - DNA, 20 bp, Artificial Sequence
  Synthetic
gccaacagtgttaagtataa

SEQ ID NO: 44148 - DNA, 20 bp, Artificial Sequence
  Synthetic
tccattatacttaacactgt

SEQ ID NO: 44149 - DNA, 20 bp, Artificial Sequence
  Synthetic
gtcttagtgtactgactctc

SEQ ID NO: 44150 - DNA, 20 bp, Artificial Sequence
  Synthetic
tcagtacactaagactgctc

SEQ ID NO: 44151 - DNA, 20 bp, Artificial Sequence
  Synthetic
tgtcattgatgatagactcc

SEQ ID NO: 44152 - DNA, 20 bp, Artificial Sequence
  Synthetic
gtgtggaaagggtgtgtatt

SEQ ID NO: 44153 - DNA, 20 bp, Artificial Sequence
  Synthetic
cattgactggagtgtggaaa

SEQ ID NO: 44154 - DNA, 20 bp, Artificial Sequence
  Synthetic
gcattgactggagtgtggaa

SEQ ID NO: 44155 - DNA, 20 bp, Artificial Sequence
  Synthetic
cctttgcattgactggagtg

SEQ ID NO: 44156 - DNA, 20 bp, Artificial Sequence
  Synthetic
ccacactccagtcaatgcaa

SEQ ID NO: 44157 - DNA, 20 bp, Artificial Sequence
  Synthetic
tttacaacctttgcattgac

SEQ ID NO: 44158 - DNA, 20 bp, Artificial Sequence
  Synthetic
agtcaatgcaaaggttgtaa

SEQ ID NO: 44159 - DNA, 20 bp, Artificial Sequence
  Synthetic
actactacaaaatcatcact

SEQ ID NO: 44160 - DNA, 20 bp, Artificial Sequence
  Synthetic
caaaatcatcactcggccaa

SEQ ID NO: 44161 - DNA, 20 bp, Artificial Sequence
  Synthetic
cggagtgtttgtaggtccat

SEQ ID NO: 44162 - DNA, 20 bp, Artificial Sequence
  Synthetic
cattttcacggagtgtttgt

SEQ ID NO: 44163 - DNA, 20 bp, Artificial Sequence
  Synthetic
ggcatttacgcacattttca

SEQ ID NO: 44164 - DNA, 20 bp, Artificial Sequence
  Synthetic
gtaaatgcctctacccatct

SEQ ID NO: 44165 - DNA, 20 bp, Artificial Sequence
  Synthetic
taaatgcctctacccatctc

SEQ ID NO: 44166 - DNA, 20 bp, Artificial Sequence
  Synthetic
actcttcccgagatgggtag

SEQ ID NO: 44167 - DNA, 20 bp, Artificial Sequence
  Synthetic
ctctgaactcttcccgagat

SEQ ID NO: 44168 - DNA, 20 bp, Artificial Sequence
  Synthetic
tctctgaactcttcccgaga

SEQ ID NO: 44169 - DNA, 20 bp, Artificial Sequence
  Synthetic
ggaagagttcagagagcatc

SEQ ID NO: 44170 - DNA, 20 bp, Artificial Sequence
  Synthetic
aaaaacagtgcgacctacaa

SEQ ID NO: 44171 - DNA, 20 bp, Artificial Sequence
  Synthetic
aaaacagtgcgacctacaat

SEQ ID NO: 44172 - DNA, 20 bp, Artificial Sequence
  Synthetic
tgaatgttttggcccattgt

SEQ ID NO: 44173 - DNA, 20 bp, Artificial Sequence
  Synthetic
atctgagtcaatgaatgttt

SEQ ID NO: 44174 - DNA, 20 bp, Artificial Sequence
  Synthetic
aatcagatctggatctgccc

SEQ ID NO: 44175 - DNA, 20 bp, Artificial Sequence
  Synthetic
atcagatctggatctgccct

SEQ ID NO: 44176 - DNA, 20 bp, Artificial Sequence
  Synthetic
cgtcaggcttgttacaccca

SEQ ID NO: 44177 - DNA, 20 bp, Artificial Sequence
  Synthetic
tcgtcaggcttgttacaccc

SEQ ID NO: 44178 - DNA, 20 bp, Artificial Sequence
  Synthetic
gggtgtaacaagcctgacga

SEQ ID NO: 44179 - DNA, 20 bp, Artificial Sequence
  Synthetic
ggtgtaacaagcctgacgat

SEQ ID NO: 44180 - DNA, 20 bp, Artificial Sequence
  Synthetic
atcatgggactcccatcgtc

SEQ ID NO: 44181 - DNA, 20 bp, Artificial Sequence
  Synthetic
gacgatgggagtcccatgat

SEQ ID NO: 44182 - DNA, 20 bp, Artificial Sequence
  Synthetic
acgatgggagtcccatgatt

SEQ ID NO: 44183 - DNA, 20 bp, Artificial Sequence
  Synthetic
cagtcgtcacacccaatcat

SEQ ID NO: 44184 - DNA, 20 bp, Artificial Sequence
  Synthetic
gcagtcgtcacacccaatca

SEQ ID NO: 44185 - DNA, 20 bp, Artificial Sequence
  Synthetic
ggtgtgacgactgcgatgac

SEQ ID NO: 44186 - DNA, 20 bp, Artificial Sequence
  Synthetic
actgcgatgactggtaccac

SEQ ID NO: 44187 - DNA, 20 bp, Artificial Sequence
  Synthetic
gcgccctgggcactcaccag

SEQ ID NO: 44188 - DNA, 20 bp, Artificial Sequence
  Synthetic
ttcacgtgcaggccctgtgt

SEQ ID NO: 44189 - DNA, 20 bp, Artificial Sequence
  Synthetic
gcagtcatgattccaacaca

SEQ ID NO: 44190 - DNA, 20 bp, Artificial Sequence
  Synthetic
tgcagtcatgattccaacac

SEQ ID NO: 44191 - DNA, 20 bp, Artificial Sequence
  Synthetic
cacccccagaagagatgcag

SEQ ID NO: 44192 - DNA, 20 bp, Artificial Sequence
  Synthetic
aaccactgcatctcttctgg

SEQ ID NO: 44193 - DNA, 20 bp, Artificial Sequence
  Synthetic
gaaccactgcatctcttctg

SEQ ID NO: 44194 - DNA, 20 bp, Artificial Sequence
  Synthetic
agaaccactgcatctcttct

SEQ ID NO: 44195 - DNA, 20 bp, Artificial Sequence
  Synthetic
cagaaccactgcatctcttc

SEQ ID NO: 44196 - DNA, 20 bp, Artificial Sequence
  Synthetic
tcttcttgttcgcacacttg

SEQ ID NO: 44197 - DNA, 20 bp, Artificial Sequence
  Synthetic
ttcttcttgttcgcacactt

SEQ ID NO: 44198 - DNA, 20 bp, Artificial Sequence
  Synthetic
cttcttcttgttcgcacact

SEQ ID NO: 44199 - DNA, 20 bp, Artificial Sequence
  Synthetic
agtgagttgaagattttgta

SEQ ID NO: 44200 - DNA, 20 bp, Artificial Sequence
  Synthetic
aagattttgtatggtcacag

SEQ ID NO: 44201 - DNA, 20 bp, Artificial Sequence
  Synthetic
agattttgtatggtcacagt

SEQ ID NO: 44202 - DNA, 20 bp, Artificial Sequence
  Synthetic
ggtcacagtgggcctgtcta

SEQ ID NO: 44203 - DNA, 20 bp, Artificial Sequence
  Synthetic
ctgaagctggctccgtagac

SEQ ID NO: 44204 - DNA, 20 bp, Artificial Sequence
  Synthetic
ctacggagccagcttcagtc

SEQ ID NO: 44205 - DNA, 20 bp, Artificial Sequence
  Synthetic
gagccagcttcagtccggat

SEQ ID NO: 44206 - DNA, 20 bp, Artificial Sequence
  Synthetic
ttacctatccggactgaagc

SEQ ID NO: 44207 - DNA, 20 bp, Artificial Sequence
  Synthetic
ttgtttgtattttacctatc

SEQ ID NO: 44208 - DNA, 20 bp, Artificial Sequence
  Synthetic
ctatctgctttcctcttcag

SEQ ID NO: 44209 - DNA, 20 bp, Artificial Sequence
  Synthetic
ctgctttcctcttcagagga

SEQ ID NO: 44210 - DNA, 20 bp, Artificial Sequence
  Synthetic
aacagttccgtcctctgaag

SEQ ID NO: 44211 - DNA, 20 bp, Artificial Sequence
  Synthetic
aggacggaactgttagattg

SEQ ID NO: 44212 - DNA, 20 bp, Artificial Sequence
  Synthetic
ttgatggttggagaattaaa

SEQ ID NO: 44213 - DNA, 20 bp, Artificial Sequence
  Synthetic
gtgaacagactgtatcagtg

SEQ ID NO: 44214 - DNA, 20 bp, Artificial Sequence
  Synthetic
ctgatacagtctgttcactt

SEQ ID NO: 44215 - DNA, 20 bp, Artificial Sequence
  Synthetic
tcacttaggtttagtagaga

SEQ ID NO: 44216 - DNA, 20 bp, Artificial Sequence
  Synthetic
tagtagagatggtgaaattt

SEQ ID NO: 44217 - DNA, 20 bp, Artificial Sequence
  Synthetic
gatggtgaaattttggcatc

SEQ ID NO: 44218 - DNA, 20 bp, Artificial Sequence
  Synthetic
tgacttccccttaggttcaa

SEQ ID NO: 44219 - DNA, 20 bp, Artificial Sequence
  Synthetic
tggataatacagttcgatta

SEQ ID NO: 44220 - DNA, 20 bp, Artificial Sequence
  Synthetic
ggataatacagttcgattat

SEQ ID NO: 44221 - DNA, 20 bp, Artificial Sequence
  Synthetic
ttggcagggtctcactgcag

SEQ ID NO: 44222 - DNA, 20 bp, Artificial Sequence
  Synthetic
gatgattctagtctgattgc

SEQ ID NO: 44223 - DNA, 20 bp, Artificial Sequence
  Synthetic
gattctagtctgattgctgg

SEQ ID NO: 44224 - DNA, 20 bp, Artificial Sequence
  Synthetic
cagattcaactgtcagagtg

SEQ ID NO: 44225 - DNA, 20 bp, Artificial Sequence
  Synthetic
ttcaactgtcagagtgtggt

SEQ ID NO: 44226 - DNA, 20 bp, Artificial Sequence
  Synthetic
cagcctttaagaatatttgc

SEQ ID NO: 44227 - DNA, 20 bp, Artificial Sequence
  Synthetic
tggccggcaaatattcttaa

SEQ ID NO: 44228 - DNA, 20 bp, Artificial Sequence
  Synthetic
attcacatcagcaagatggc

SEQ ID NO: 44229 - DNA, 20 bp, Artificial Sequence
  Synthetic
tacaattcacatcagcaaga

SEQ ID NO: 44230 - DNA, 20 bp, Artificial Sequence
  Synthetic
attagaatttggatggaatc

SEQ ID NO: 44231 - DNA, 20 bp, Artificial Sequence
  Synthetic
caacataattagaatttgga

SEQ ID NO: 44232 - DNA, 20 bp, Artificial Sequence
  Synthetic
gtagcaacataattagaatt

SEQ ID NO: 44233 - DNA, 20 bp, Artificial Sequence
  Synthetic
aaattctaattatgttgcta

SEQ ID NO: 44234 - DNA, 20 bp, Artificial Sequence
  Synthetic
aattctaattatgttgctac

SEQ ID NO: 44235 - DNA, 20 bp, Artificial Sequence
  Synthetic
gctctgcagacagaactgtg

SEQ ID NO: 44236 - DNA, 20 bp, Artificial Sequence
  Synthetic
cagacagaactgtgcggctc

SEQ ID NO: 44237 - DNA, 20 bp, Artificial Sequence
  Synthetic
agacagaactgtgcggctct

SEQ ID NO: 44238 - DNA, 20 bp, Artificial Sequence
  Synthetic
tcctgaatggtaactgtgta

SEQ ID NO: 44239 - DNA, 20 bp, Artificial Sequence
  Synthetic
aactgtgtaaggatcttcac

SEQ ID NO: 44240 - DNA, 20 bp, Artificial Sequence
  Synthetic
aaggatcttcactggacaca

SEQ ID NO: 44241 - DNA, 20 bp, Artificial Sequence
  Synthetic
gaaaatgtcaaggaatgaat

SEQ ID NO: 44242 - DNA, 20 bp, Artificial Sequence
  Synthetic
tccttgacattttctcccaa

SEQ ID NO: 44243 - DNA, 20 bp, Artificial Sequence
  Synthetic
cccattgggagaaaatgtca

SEQ ID NO: 44244 - DNA, 20 bp, Artificial Sequence
  Synthetic
ccttgacattttctcccaat

SEQ ID NO: 44245 - DNA, 20 bp, Artificial Sequence
  Synthetic
ttctcccaatgggagattcc

SEQ ID NO: 44246 - DNA, 20 bp, Artificial Sequence
  Synthetic
gtagccaggaatctcccatt

SEQ ID NO: 44247 - DNA, 20 bp, Artificial Sequence
  Synthetic
tgtagccaggaatctcccat

SEQ ID NO: 44248 - DNA, 20 bp, Artificial Sequence
  Synthetic
aatgggagattcctggctac

SEQ ID NO: 44249 - DNA, 20 bp, Artificial Sequence
  Synthetic
catctgttgctcctgtagcc

SEQ ID NO: 44250 - DNA, 20 bp, Artificial Sequence
  Synthetic
ctggctacaggagcaacaga

SEQ ID NO: 44251 - DNA, 20 bp, Artificial Sequence
  Synthetic
cagatggcagagtgcttctt

SEQ ID NO: 44252 - DNA, 20 bp, Artificial Sequence
  Synthetic
agatggcagagtgcttcttt

SEQ ID NO: 44253 - DNA, 20 bp, Artificial Sequence
  Synthetic
agagtgcttctttgggatat

SEQ ID NO: 44254 - DNA, 20 bp, Artificial Sequence
  Synthetic
ccttcaaacatttacttgtt

SEQ ID NO: 44255 - DNA, 20 bp, Artificial Sequence
  Synthetic
tcaaacatttacttgtttgg

SEQ ID NO: 44256 - DNA, 20 bp, Artificial Sequence
  Synthetic
caaacatttacttgtttggt

SEQ ID NO: 44257 - DNA, 20 bp, Artificial Sequence
  Synthetic
acttgtttggtgggatataa

SEQ ID NO: 44258 - DNA, 20 bp, Artificial Sequence
  Synthetic
aaggacacaactatccagta

SEQ ID NO: 44259 - DNA, 20 bp, Artificial Sequence
  Synthetic
aggacacaactatccagtat

SEQ ID NO: 44260 - DNA, 20 bp, Artificial Sequence
  Synthetic
gaaaattgtgtgtcccatac

SEQ ID NO: 44261 - DNA, 20 bp, Artificial Sequence
  Synthetic
gacacacaattttctccata

SEQ ID NO: 44262 - DNA, 20 bp, Artificial Sequence
  Synthetic
gacacaaaataatatccata

SEQ ID NO: 44263 - DNA, 20 bp, Artificial Sequence
  Synthetic
tatggatattattttgtgtc

SEQ ID NO: 44264 - DNA, 20 bp, Artificial Sequence
  Synthetic
atggatattattttgtgtca

SEQ ID NO: 44265 - DNA, 20 bp, Artificial Sequence
  Synthetic
tggatattattttgtgtcag

SEQ ID NO: 44266 - DNA, 20 bp, Artificial Sequence
  Synthetic
ggatattattttgtgtcagg

SEQ ID NO: 44267 - DNA, 20 bp, Artificial Sequence
  Synthetic
ggggccatgaccgagtagct

SEQ ID NO: 44268 - DNA, 20 bp, Artificial Sequence
  Synthetic
cttaccgagctactcggtca

SEQ ID NO: 44269 - DNA, 20 bp, Artificial Sequence
  Synthetic
agtgttcttaccgagctact

SEQ ID NO: 44270 - DNA, 20 bp, Artificial Sequence
  Synthetic
aataactttataaaaggctc

SEQ ID NO: 44271 - DNA, 20 bp, Artificial Sequence
  Synthetic
ataactttataaaaggctct

SEQ ID NO: 44272 - DNA, 20 bp, Artificial Sequence
  Synthetic
accctttataaagagttgag

SEQ ID NO: 44273 - DNA, 20 bp, Artificial Sequence
  Synthetic
gcctctcaactctttataaa

SEQ ID NO: 44274 - DNA, 20 bp, Artificial Sequence
  Synthetic
ggcctctcaactctttataa

SEQ ID NO: 44275 - DNA, 20 bp, Artificial Sequence
  Synthetic
ggctggtgatattgtctgtg

SEQ ID NO: 44276 - DNA, 20 bp, Artificial Sequence
  Synthetic
gtctggactgaaggtgaggc

SEQ ID NO: 44277 - DNA, 20 bp, Artificial Sequence
  Synthetic
cgctgtctggactgaaggtg

SEQ ID NO: 44278 - DNA, 20 bp, Artificial Sequence
  Synthetic
ctcaccttcagtccagacag

SEQ ID NO: 44279 - DNA, 20 bp, Artificial Sequence
  Synthetic
caagccgctgtctggactga

SEQ ID NO: 44280 - DNA, 20 bp, Artificial Sequence
  Synthetic
gaggcaatcaagccgctgtc

SEQ ID NO: 44281 - DNA, 20 bp, Artificial Sequence
  Synthetic
cttgattgcctctgcctcca

SEQ ID NO: 44282 - DNA, 20 bp, Artificial Sequence
  Synthetic
cgagttgtccatggaggcag

SEQ ID NO: 44283 - DNA, 20 bp, Artificial Sequence
  Synthetic
ctctgcctccatggacaact

SEQ ID NO: 44284 - DNA, 20 bp, Artificial Sequence
  Synthetic
gcgcaccgagttgtccatgg

SEQ ID NO: 44285 - DNA, 20 bp, Artificial Sequence
  Synthetic
gacgcgcaccgagttgtcca

SEQ ID NO: 44286 - DNA, 20 bp, Artificial Sequence
  Synthetic
tggacaactcggtgcgcgtc

SEQ ID NO: 44287 - DNA, 20 bp, Artificial Sequence
  Synthetic
ggacaactcggtgcgcgtct

SEQ ID NO: 44288 - DNA, 20 bp, Artificial Sequence
  Synthetic
gcacggagatgaagatactg

SEQ ID NO: 44289 - DNA, 20 bp, Artificial Sequence
  Synthetic
cacggagatgaagatactgc

SEQ ID NO: 44290 - DNA, 20 bp, Artificial Sequence
  Synthetic
acggagatgaagatactgcg

SEQ ID NO: 44291 - DNA, 20 bp, Artificial Sequence
  Synthetic
aagatactgcggggccactg

SEQ ID NO: 44292 - DNA, 20 bp, Artificial Sequence
  Synthetic
tgctgtacactggtccgcag

SEQ ID NO: 44293 - DNA, 20 bp, Artificial Sequence
  Synthetic
gcggaccagtgtacagcacg

SEQ ID NO: 44294 - DNA, 20 bp, Artificial Sequence
  Synthetic
aggaacctcgtgctgtacac

SEQ ID NO: 44295 - DNA, 20 bp, Artificial Sequence
  Synthetic
gtacagcacgaggttcctcg

SEQ ID NO: 44296 - DNA, 20 bp, Artificial Sequence
  Synthetic
aggttcctcgcggacagctc

SEQ ID NO: 44297 - DNA, 20 bp, Artificial Sequence
  Synthetic
ggttcctcgcggacagctca

SEQ ID NO: 44298 - DNA, 20 bp, Artificial Sequence
  Synthetic
gcaaccctgagctgtccgcg

SEQ ID NO: 44299 - DNA, 20 bp, Artificial Sequence
  Synthetic
aagacatgtccatcagatac

SEQ ID NO: 44300 - DNA, 20 bp, Artificial Sequence
  Synthetic
agacatgtccatcagatact

SEQ ID NO: 44301 - DNA, 20 bp, Artificial Sequence
  Synthetic
gtccatcagatactgggatc

SEQ ID NO: 44302 - DNA, 20 bp, Artificial Sequence
  Synthetic
tccatcagatactgggatct

SEQ ID NO: 44303 - DNA, 20 bp, Artificial Sequence
  Synthetic
ccccagatcccagtatctga

SEQ ID NO: 44304 - DNA, 20 bp, Artificial Sequence
  Synthetic
accaacactgtgttgtacca

SEQ ID NO: 44305 - DNA, 20 bp, Artificial Sequence
  Synthetic
acacaggataggcatgtcct

SEQ ID NO: 44306 - DNA, 20 bp, Artificial Sequence
  Synthetic
aaggacatgcctatcctgtg

SEQ ID NO: 44307 - DNA, 20 bp, Artificial Sequence
  Synthetic
aggacatgcctatcctgtgt

SEQ ID NO: 44308 - DNA, 20 bp, Artificial Sequence
  Synthetic
tgcctatcctgtgtgggatc

SEQ ID NO: 44309 - DNA, 20 bp, Artificial Sequence
  Synthetic
gtccagatcccacacaggat

SEQ ID NO: 44310 - DNA, 20 bp, Artificial Sequence
  Synthetic
ctgatgtccagatcccacac

SEQ ID NO: 44311 - DNA, 20 bp, Artificial Sequence
  Synthetic
ctggcgaagtacaggctata

SEQ ID NO: 44312 - DNA, 20 bp, Artificial Sequence
  Synthetic
tatagcctgtacttcgccag

SEQ ID NO: 44313 - DNA, 20 bp, Artificial Sequence
  Synthetic
atagcctgtacttcgccagc

SEQ ID NO: 44314 - DNA, 20 bp, Artificial Sequence
  Synthetic
gggacccgctggcgaagtac

SEQ ID NO: 44315 - DNA, 20 bp, Artificial Sequence
  Synthetic
ggtgcggtcgtgggacccgc

SEQ ID NO: 44316 - DNA, 20 bp, Artificial Sequence
  Synthetic
ggtcccacgaccgcaccgcc

SEQ ID NO: 44317 - DNA, 20 bp, Artificial Sequence
  Synthetic
cagcctggcggtgcggtcgt

SEQ ID NO: 44318 - DNA, 20 bp, Artificial Sequence
  Synthetic
acagcctggcggtgcggtcg

SEQ ID NO: 44319 - DNA, 20 bp, Artificial Sequence
  Synthetic
acgaccgcaccgccaggctg

SEQ ID NO: 44320 - DNA, 20 bp, Artificial Sequence
  Synthetic
atgaccacagcctggcggtg

SEQ ID NO: 44321 - DNA, 20 bp, Artificial Sequence
  Synthetic
atcaaatgaccacagcctgg

SEQ ID NO: 44322 - DNA, 20 bp, Artificial Sequence
  Synthetic
ccgatcaaatgaccacagcc

SEQ ID NO: 44323 - DNA, 20 bp, Artificial Sequence
  Synthetic
gagcgctcagcaggggaact

SEQ ID NO: 44324 - DNA, 20 bp, Artificial Sequence
  Synthetic
ctcagcaggggaactcggtg

SEQ ID NO: 44325 - DNA, 20 bp, Artificial Sequence
  Synthetic
aactcggtgaggcttttcac

SEQ ID NO: 44326 - DNA, 20 bp, Artificial Sequence
  Synthetic
aggcttttcacaggccaccg

SEQ ID NO: 44327 - DNA, 20 bp, Artificial Sequence
  Synthetic
gagaaagcacggggccacgg

SEQ ID NO: 44328 - DNA, 20 bp, Artificial Sequence
  Synthetic
cgagagaaagcacggggcca

SEQ ID NO: 44329 - DNA, 20 bp, Artificial Sequence
  Synthetic
aaaaggcgagagaaagcacg

SEQ ID NO: 44330 - DNA, 20 bp, Artificial Sequence
  Synthetic
gaaaaggcgagagaaagcac

SEQ ID NO: 44331 - DNA, 20 bp, Artificial Sequence
  Synthetic
agaaaaggcgagagaaagca

SEQ ID NO: 44332 - DNA, 20 bp, Artificial Sequence
  Synthetic
tctctcgccttttctcccaa

SEQ ID NO: 44333 - DNA, 20 bp, Artificial Sequence
  Synthetic
gtacttaccgttgggagaaa

SEQ ID NO: 44334 - DNA, 20 bp, Artificial Sequence
  Synthetic
ttctcccaacggtaagtact

SEQ ID NO: 44335 - DNA, 20 bp, Artificial Sequence
  Synthetic
gacgccaagtacttaccgtt

SEQ ID NO: 44336 - DNA, 20 bp, Artificial Sequence
  Synthetic
agacgccaagtacttaccgt

SEQ ID NO: 44337 - DNA, 20 bp, Artificial Sequence
  Synthetic
ggtaagtacttggcgtctgc

SEQ ID NO: 44338 - DNA, 20 bp, Artificial Sequence
  Synthetic
gtacttggcgtctgctggcg

SEQ ID NO: 44339 - DNA, 20 bp, Artificial Sequence
  Synthetic
cgtctgctggcgaggaccag

SEQ ID NO: 44340 - DNA, 20 bp, Artificial Sequence
  Synthetic
aggaccagcggttgaagctg

SEQ ID NO: 44341 - DNA, 20 bp, Artificial Sequence
  Synthetic
ggaccagcggttgaagctgt

SEQ ID NO: 44342 - DNA, 20 bp, Artificial Sequence
  Synthetic
agtcccacagcttcaaccgc

SEQ ID NO: 44343 - DNA, 20 bp, Artificial Sequence
  Synthetic
gcggttgaagctgtgggact

SEQ ID NO: 44344 - DNA, 20 bp, Artificial Sequence
  Synthetic
ttgatcggacgtacccgctg

SEQ ID NO: 44345 - DNA, 20 bp, Artificial Sequence
  Synthetic
tacccgctgaggatatatgc

SEQ ID NO: 44346 - DNA, 20 bp, Artificial Sequence
  Synthetic
gtcctgcatatatcctcagc

SEQ ID NO: 44347 - DNA, 20 bp, Artificial Sequence
  Synthetic
tgtcctgcatatatcctcag

SEQ ID NO: 44348 - DNA, 20 bp, Artificial Sequence
  Synthetic
gaggatatatgcaggacacc

SEQ ID NO: 44349 - DNA, 20 bp, Artificial Sequence
  Synthetic
tgcaggacacctggcagatg

SEQ ID NO: 44350 - DNA, 20 bp, Artificial Sequence
  Synthetic
tgacacagtccacatctgcc

SEQ ID NO: 44351 - DNA, 20 bp, Artificial Sequence
  Synthetic
ccaagtagtttgaattaggg

SEQ ID NO: 44352 - DNA, 20 bp, Artificial Sequence
  Synthetic
ccaccctaattcaaactact

SEQ ID NO: 44353 - DNA, 20 bp, Artificial Sequence
  Synthetic
tggccaagtagtttgaatta

SEQ ID NO: 44354 - DNA, 20 bp, Artificial Sequence
  Synthetic
gtggccaagtagtttgaatt

SEQ ID NO: 44355 - DNA, 20 bp, Artificial Sequence
  Synthetic
taattcaaactacttggcca

SEQ ID NO: 44356 - DNA, 20 bp, Artificial Sequence
  Synthetic
aattcaaactacttggccac

SEQ ID NO: 44357 - DNA, 20 bp, Artificial Sequence
  Synthetic
ggtcttgtcggttgagcccg

SEQ ID NO: 44358 - DNA, 20 bp, Artificial Sequence
  Synthetic
gctcaaccgacaagaccgtc

SEQ ID NO: 44359 - DNA, 20 bp, Artificial Sequence
  Synthetic
ccacagccggacggtcttgt

SEQ ID NO: 44360 - DNA, 20 bp, Artificial Sequence
  Synthetic
ccgacaagaccgtccggctg

SEQ ID NO: 44361 - DNA, 20 bp, Artificial Sequence
  Synthetic
ctgagcgctccacagccgga

SEQ ID NO: 44362 - DNA, 20 bp, Artificial Sequence
  Synthetic
cctgctgagcgctccacagc

SEQ ID NO: 44363 - DNA, 20 bp, Artificial Sequence
  Synthetic
agcaagcagcttgctatcgg

SEQ ID NO: 44364 - DNA, 20 bp, Artificial Sequence
  Synthetic
cagcaagcagcttgctatcg

SEQ ID NO: 44365 - DNA, 20 bp, Artificial Sequence
  Synthetic
gcagcaagcagcttgctatc

SEQ ID NO: 44366 - DNA, 20 bp, Artificial Sequence
  Synthetic
agcagcaagcagcttgctat

SEQ ID NO: 44367 - DNA, 20 bp, Artificial Sequence
  Synthetic
gatagcaagctgcttgctgc

SEQ ID NO: 44368 - DNA, 20 bp, Artificial Sequence
  Synthetic
atagcaagctgcttgctgct

SEQ ID NO: 44369 - DNA, 20 bp, Artificial Sequence
  Synthetic
acaactcctgtataaaactt

SEQ ID NO: 44370 - DNA, 20 bp, Artificial Sequence
  Synthetic
taaactccaaagttttatac

SEQ ID NO: 44371 - DNA, 20 bp, Artificial Sequence
  Synthetic
aagaagaaaagaaagcgatg

SEQ ID NO: 44372 - DNA, 20 bp, Artificial Sequence
  Synthetic
agaagaaaagaaagcgatgt

SEQ ID NO: 44373 - DNA, 20 bp, Artificial Sequence
  Synthetic
gaagaaaagaaagcgatgtg

SEQ ID NO: 44374 - DNA, 20 bp, Artificial Sequence
  Synthetic
cagttggtcttctgctggca

SEQ ID NO: 44375 - DNA, 20 bp, Artificial Sequence
  Synthetic
acagttggtcttctgctggc

SEQ ID NO: 44376 - DNA, 20 bp, Artificial Sequence
  Synthetic
tgccagcagaagaccaactg

SEQ ID NO: 44377 - DNA, 20 bp, Artificial Sequence
  Synthetic
caccacagttggtcttctgc

SEQ ID NO: 44378 - DNA, 20 bp, Artificial Sequence
  Synthetic
gtaagtgcattcaccacagt

SEQ ID NO: 44379 - DNA, 20 bp, Artificial Sequence
  Synthetic
ttcttttcttacagatctga

SEQ ID NO: 44380 - DNA, 20 bp, Artificial Sequence
  Synthetic
ctgtaagaaaagaaaatgtg

SEQ ID NO: 44381 - DNA, 20 bp, Artificial Sequence
  Synthetic
ctctgctgctgctggggctg

SEQ ID NO: 44382 - DNA, 20 bp, Artificial Sequence
  Synthetic
tgatgtggctgctgctgctg

SEQ ID NO: 44383 - DNA, 20 bp, Artificial Sequence
  Synthetic
tggggtctctgctgctgctg

SEQ ID NO: 44384 - DNA, 20 bp, Artificial Sequence
  Synthetic
ggtgatgtggctgctgctgc

SEQ ID NO: 44385 - DNA, 20 bp, Artificial Sequence
  Synthetic
tgccgtctgggtctgaagga

SEQ ID NO: 44386 - DNA, 20 bp, Artificial Sequence
  Synthetic
cagtgacccctgagaatgga

SEQ ID NO: 44387 - DNA, 20 bp, Artificial Sequence
  Synthetic
aagctcaggaggagaaaaaa

SEQ ID NO: 44388 - DNA, 20 bp, Artificial Sequence
  Synthetic
tctgtagaggctggggctgc

SEQ ID NO: 44389 - DNA, 20 bp, Artificial Sequence
  Synthetic
gtggctgcttctgtagaggc

SEQ ID NO: 44390 - DNA, 20 bp, Artificial Sequence
  Synthetic
tgctgctgctggggctgtgg

SEQ ID NO: 44391 - DNA, 20 bp, Artificial Sequence
  Synthetic
ctggggtctctgctgctgct

SEQ ID NO: 44392 - DNA, 20 bp, Artificial Sequence
  Synthetic
gtgatgtggctgctgctgct

SEQ ID NO: 44393 - DNA, 20 bp, Artificial Sequence
  Synthetic
gggtgtggcttctggtgcag

SEQ ID NO: 44394 - DNA, 20 bp, Artificial Sequence
  Synthetic
tcatggagcatgtactacaa

SEQ ID NO: 44395 - DNA, 20 bp, Artificial Sequence
  Synthetic
cttccttgggatcttgcttc

SEQ ID NO: 44396 - DNA, 20 bp, Artificial Sequence
  Synthetic
ttgccagaagcaagatccca

SEQ ID NO: 44397 - DNA, 20 bp, Artificial Sequence
  Synthetic
caagcagcttaaacttcctt

SEQ ID NO: 44398 - DNA, 20 bp, Artificial Sequence
  Synthetic
ccaagcagcttaaacttcct

SEQ ID NO: 44399 - DNA, 20 bp, Artificial Sequence
  Synthetic
ccaaggaagtttaagctgct

SEQ ID NO: 44400 - DNA, 20 bp, Artificial Sequence
  Synthetic
caaggaagtttaagctgctt

SEQ ID NO: 44401 - DNA, 20 bp, Artificial Sequence
  Synthetic
aaggaagtttaagctgcttg

SEQ ID NO: 44402 - DNA, 20 bp, Artificial Sequence
  Synthetic
gcttggggatgacccaaaag

SEQ ID NO: 44403 - DNA, 20 bp, Artificial Sequence
  Synthetic
ggaagtaaacaaacctcttt

SEQ ID NO: 44404 - DNA, 20 bp, Artificial Sequence
  Synthetic
ctttatacaggaagagaaac

SEQ ID NO: 44405 - DNA, 20 bp, Artificial Sequence
  Synthetic
ttggtgccataagagtggac

SEQ ID NO: 44406 - DNA, 20 bp, Artificial Sequence
  Synthetic
gcaaaacctgtccactctta

SEQ ID NO: 44407 - DNA, 20 bp, Artificial Sequence
  Synthetic
atatgttggtgccataagag

SEQ ID NO: 44408 - DNA, 20 bp, Artificial Sequence
  Synthetic
ggtgcaagtttcttatatgt

SEQ ID NO: 44409 - DNA, 20 bp, Artificial Sequence
  Synthetic
acctgattattatatgcatc

SEQ ID NO: 44410 - DNA, 20 bp, Artificial Sequence
  Synthetic
acctgatgcatataataatc

SEQ ID NO: 44411 - DNA, 20 bp, Artificial Sequence
  Synthetic
ttcagacccagacggcactc

SEQ ID NO: 44412 - DNA, 20 bp, Artificial Sequence
  Synthetic
agagcaccagagtgccgtct

SEQ ID NO: 44413 - DNA, 20 bp, Artificial Sequence
  Synthetic
cagagcaccagagtgccgtc

SEQ ID NO: 44414 - DNA, 20 bp, Artificial Sequence
  Synthetic
ggccttccttcagacccaga

SEQ ID NO: 44415 - DNA, 20 bp, Artificial Sequence
  Synthetic
agagtgccgtctgggtctga

SEQ ID NO: 44416 - DNA, 20 bp, Artificial Sequence
  Synthetic
aaggaaggccgtccattctc

SEQ ID NO: 44417 - DNA, 20 bp, Artificial Sequence
  Synthetic
ggaaggccgtccattctcag

SEQ ID NO: 44418 - DNA, 20 bp, Artificial Sequence
  Synthetic
aggaaggccgtccattctca

SEQ ID NO: 44419 - DNA, 20 bp, Artificial Sequence
  Synthetic
catgcagtgacccctgagaa

SEQ ID NO: 44420 - DNA, 20 bp, Artificial Sequence
  Synthetic
ctcaggggtcactgcatgtt

SEQ ID NO: 44421 - DNA, 20 bp, Artificial Sequence
  Synthetic
catgttgtgcaagtctctgt

SEQ ID NO: 44422 - DNA, 20 bp, Artificial Sequence
  Synthetic
gcatgttgtgcaagtctctg

SEQ ID NO: 44423 - DNA, 20 bp, Artificial Sequence
  Synthetic
gacttgcacaacatgcagaa

SEQ ID NO: 44424 - DNA, 20 bp, Artificial Sequence
  Synthetic
catgcagaatggcagcacat

SEQ ID NO: 44425 - DNA, 20 bp, Artificial Sequence
  Synthetic
ctctagtgagagtgcatacc

SEQ ID NO: 44426 - DNA, 20 bp, Artificial Sequence
  Synthetic
agagaagacaatcgagaatt

SEQ ID NO: 44427 - DNA, 20 bp, Artificial Sequence
  Synthetic
gaagacaatcgagaatttgg

SEQ ID NO: 44428 - DNA, 20 bp, Artificial Sequence
  Synthetic
agaatttggaggaaaacctg

SEQ ID NO: 44429 - DNA, 20 bp, Artificial Sequence
  Synthetic
acgtgaagctgctcatcctc

SEQ ID NO: 44430 - DNA, 20 bp, Artificial Sequence
  Synthetic
acgtcagagactttgtataa

SEQ ID NO: 44431 - DNA, 20 bp, Artificial Sequence
  Synthetic
tttatacaaagtctctgacg

SEQ ID NO: 44432 - DNA, 20 bp, Artificial Sequence
  Synthetic
gtctctgacgtggatgagtt

SEQ ID NO: 44433 - DNA, 20 bp, Artificial Sequence
  Synthetic
tctctgacgtggatgagttt

SEQ ID NO: 44434 - DNA, 20 bp, Artificial Sequence
  Synthetic
cgtggatgagtttgggagtg

SEQ ID NO: 44435 - DNA, 20 bp, Artificial Sequence
  Synthetic
gtttgggagtgtggaagctc

SEQ ID NO: 44436 - DNA, 20 bp, Artificial Sequence
  Synthetic
tgggagtgtggaagctcagg

SEQ ID NO: 44437 - DNA, 20 bp, Artificial Sequence
  Synthetic
caggaggagaaaaaacggag

SEQ ID NO: 44438 - DNA, 20 bp, Artificial Sequence
  Synthetic
aaaacggagtggtgccattc

SEQ ID NO: 44439 - DNA, 20 bp, Artificial Sequence
  Synthetic
aaaagaactcagtacctgaa

SEQ ID NO: 44440 - DNA, 20 bp, Artificial Sequence
  Synthetic
ctttgtcggcaagtcttgac

SEQ ID NO: 44441 - DNA, 20 bp, Artificial Sequence
  Synthetic
cagtcaagacttgccgacaa

SEQ ID NO: 44442 - DNA, 20 bp, Artificial Sequence
  Synthetic
tggcttctagtttcctttgt

SEQ ID NO: 44443 - DNA, 20 bp, Artificial Sequence
  Synthetic
agctgaaaagctttcctccc

SEQ ID NO: 44444 - DNA, 20 bp, Artificial Sequence
  Synthetic
atttgagctgttctccaggg

SEQ ID NO: 44445 - DNA, 20 bp, Artificial Sequence
  Synthetic
tttatttgagctgttctcca

SEQ ID NO: 44446 - DNA, 20 bp, Artificial Sequence
  Synthetic
cagctcaaataaaaatgaaa

SEQ ID NO: 44447 - DNA, 20 bp, Artificial Sequence
  Synthetic
acaaactgaaaacgcaagcc

SEQ ID NO: 44448 - DNA, 20 bp, Artificial Sequence
  Synthetic
tacctgccaactgtttagcc

SEQ ID NO: 44449 - DNA, 20 bp, Artificial Sequence
  Synthetic
cgcaagccaggctaaacagt

SEQ ID NO: 44450 - DNA, 20 bp, Artificial Sequence
  Synthetic
agccaggctaaacagttggc

SEQ ID NO: 44451 - DNA, 20 bp, Artificial Sequence
  Synthetic
tgctgggactgctgcatgac

SEQ ID NO: 44452 - DNA, 20 bp, Artificial Sequence
  Synthetic
ctgtagaggctggggctgct

SEQ ID NO: 44453 - DNA, 20 bp, Artificial Sequence
  Synthetic
tggctgcttctgtagaggct

SEQ ID NO: 44454 - DNA, 20 bp, Artificial Sequence
  Synthetic
ggctgcttctgtagaggctg

SEQ ID NO: 44455 - DNA, 20 bp, Artificial Sequence
  Synthetic
tgtggtggctgcttctgtag

SEQ ID NO: 44456 - DNA, 20 bp, Artificial Sequence
  Synthetic
gctggggtctctgctgctgc

SEQ ID NO: 44457 - DNA, 20 bp, Artificial Sequence
  Synthetic
gactctgtctgagggtgatg

SEQ ID NO: 44458 - DNA, 20 bp, Artificial Sequence
  Synthetic
agttgacagactctgtctga

SEQ ID NO: 44459 - DNA, 20 bp, Artificial Sequence
  Synthetic
gagttgacagactctgtctg

SEQ ID NO: 44460 - DNA, 20 bp, Artificial Sequence
  Synthetic
gtcaactcttattctgcttc

SEQ ID NO: 44461 - DNA, 20 bp, Artificial Sequence
  Synthetic
ccgtctcatgtatggattgg

SEQ ID NO: 44462 - DNA, 20 bp, Artificial Sequence
  Synthetic
gggccgtctcatgtatggat

SEQ ID NO: 44463 - DNA, 20 bp, Artificial Sequence
  Synthetic
ggattgggccgtctcatgta

SEQ ID NO: 44464 - DNA, 20 bp, Artificial Sequence
  Synthetic
ccaccaatccatacatgaga

SEQ ID NO: 44465 - DNA, 20 bp, Artificial Sequence
  Synthetic
tggataaggactaactggat

SEQ ID NO: 44466 - DNA, 20 bp, Artificial Sequence
  Synthetic
ggataaggactaactggatt

SEQ ID NO: 44467 - DNA, 20 bp, Artificial Sequence
  Synthetic
gagtttggataaggactaac

SEQ ID NO: 44468 - DNA, 20 bp, Artificial Sequence
  Synthetic
gtgtgtgaagagtttggata

SEQ ID NO: 44469 - DNA, 20 bp, Artificial Sequence
  Synthetic
tctgaagtgtgtgaagagtt

SEQ ID NO: 44470 - DNA, 20 bp, Artificial Sequence
  Synthetic
tcacacacttcagatatcta

SEQ ID NO: 44471 - DNA, 20 bp, Artificial Sequence
  Synthetic
ggaatagaagttcatagggc

SEQ ID NO: 44472 - DNA, 20 bp, Artificial Sequence
  Synthetic
aggtggaatagaagttcata

SEQ ID NO: 44473 - DNA, 20 bp, Artificial Sequence
  Synthetic
gaggtggaatagaagttcat

SEQ ID NO: 44474 - DNA, 20 bp, Artificial Sequence
  Synthetic
acctgcagcttgagatgagg

SEQ ID NO: 44475 - DNA, 20 bp, Artificial Sequence
  Synthetic
tgaacctgcagcttgagatg

SEQ ID NO: 44476 - DNA, 20 bp, Artificial Sequence
  Synthetic
tccacctcatctcaagctgc

SEQ ID NO: 44477 - DNA, 20 bp, Artificial Sequence
  Synthetic
agcccagggtaagggttcat

SEQ ID NO: 44478 - DNA, 20 bp, Artificial Sequence
  Synthetic
aagcccagggtaagggttca

SEQ ID NO: 44479 - DNA, 20 bp, Artificial Sequence
  Synthetic
gattcaaaagcccagggtaa

SEQ ID NO: 44480 - DNA, 20 bp, Artificial Sequence
  Synthetic
aatcccatgaacccttaccc

SEQ ID NO: 44481 - DNA, 20 bp, Artificial Sequence
  Synthetic
atcccatgaacccttaccct

SEQ ID NO: 44482 - DNA, 20 bp, Artificial Sequence
  Synthetic
tgattcaaaagcccagggta

SEQ ID NO: 44483 - DNA, 20 bp, Artificial Sequence
  Synthetic
tattctgattcaaaagccca

SEQ ID NO: 44484 - DNA, 20 bp, Artificial Sequence
  Synthetic
gtattctgattcaaaagccc

SEQ ID NO: 44485 - DNA, 20 bp, Artificial Sequence
  Synthetic
tgcattgatatgatggatat

SEQ ID NO: 44486 - DNA, 20 bp, Artificial Sequence
  Synthetic
gcattgatatgatggatatt

SEQ ID NO: 44487 - DNA, 20 bp, Artificial Sequence
  Synthetic
tttccattgcattgatatga

SEQ ID NO: 44488 - DNA, 20 bp, Artificial Sequence
  Synthetic
tatccatcatatcaatgcaa

SEQ ID NO: 44489 - DNA, 20 bp, Artificial Sequence
  Synthetic
gggagcagttgtccactgat

SEQ ID NO: 44490 - DNA, 20 bp, Artificial Sequence
  Synthetic
atgcaatggaaacctatcag

SEQ ID NO: 44491 - DNA, 20 bp, Artificial Sequence
  Synthetic
agaataggaacccagatatg

SEQ ID NO: 44492 - DNA, 20 bp, Artificial Sequence
  Synthetic
ggacaactgctccccatatc

SEQ ID NO: 44493 - DNA, 20 bp, Artificial Sequence
  Synthetic
gacaactgctccccatatct

SEQ ID NO: 44494 - DNA, 20 bp, Artificial Sequence
  Synthetic
gagaataggaacccagatat

SEQ ID NO: 44495 - DNA, 20 bp, Artificial Sequence
  Synthetic
ggagaataggaacccagata

SEQ ID NO: 44496 - DNA, 20 bp, Artificial Sequence
  Synthetic
cggctgagactggggagaat

SEQ ID NO: 44497 - DNA, 20 bp, Artificial Sequence
  Synthetic
acagatccatcggctgagac

SEQ ID NO: 44498 - DNA, 20 bp, Artificial Sequence
  Synthetic
cagatccatcggctgagact

SEQ ID NO: 44499 - DNA, 20 bp, Artificial Sequence
  Synthetic
agatccatcggctgagactg

SEQ ID NO: 44500 - DNA, 20 bp, Artificial Sequence
  Synthetic
ttctccccagtctcagccga

SEQ ID NO: 44501 - DNA, 20 bp, Artificial Sequence
  Synthetic
ggatacctatacagatccat

SEQ ID NO: 44502 - DNA, 20 bp, Artificial Sequence
  Synthetic
ctcagccgatggatctgtat

SEQ ID NO: 44503 - DNA, 20 bp, Artificial Sequence
  Synthetic
ttagacagagggtcttggct

SEQ ID NO: 44504 - DNA, 20 bp, Artificial Sequence
  Synthetic
tgagcttagacagagggtct

SEQ ID NO: 44505 - DNA, 20 bp, Artificial Sequence
  Synthetic
gtagactgagcttagacaga

SEQ ID NO: 44506 - DNA, 20 bp, Artificial Sequence
  Synthetic
ggtagactgagcttagacag

SEQ ID NO: 44507 - DNA, 20 bp, Artificial Sequence
  Synthetic
tggtaaagtgtatggatggg

SEQ ID NO: 44508 - DNA, 20 bp, Artificial Sequence
  Synthetic
tggctggtaaagtgtatgga

SEQ ID NO: 44509 - DNA, 20 bp, Artificial Sequence
  Synthetic
ggctggtaaagtgtatggat

SEQ ID NO: 44510 - DNA, 20 bp, Artificial Sequence
  Synthetic
accttggctggtaaagtgta

SEQ ID NO: 44511 - DNA, 20 bp, Artificial Sequence
  Synthetic
tccatacactttaccagcca

SEQ ID NO: 44512 - DNA, 20 bp, Artificial Sequence
  Synthetic
ggctatttccaaaccttggc

SEQ ID NO: 44513 - DNA, 20 bp, Artificial Sequence
  Synthetic
acactttaccagccaaggtt

SEQ ID NO: 44514 - DNA, 20 bp, Artificial Sequence
  Synthetic
ctctggctatttccaaacct

SEQ ID NO: 44515 - DNA, 20 bp, Artificial Sequence
  Synthetic
agtatttagatgtaaaactc

SEQ ID NO: 44516 - DNA, 20 bp, Artificial Sequence
  Synthetic
acatctaaatacttaggtta

SEQ ID NO: 44517 - DNA, 20 bp, Artificial Sequence
  Synthetic
aaccatctccctgcatattt

SEQ ID NO: 44518 - DNA, 20 bp, Artificial Sequence
  Synthetic
ttatggaaaccaaaatatgc

SEQ ID NO: 44519 - DNA, 20 bp, Artificial Sequence
  Synthetic
tatggaaaccaaaatatgca

SEQ ID NO: 44520 - DNA, 20 bp, Artificial Sequence
  Synthetic
aaccaaaatatgcagggaga

SEQ ID NO: 44521 - DNA, 20 bp, Artificial Sequence
  Synthetic
atgatgtacatttggtctaa

SEQ ID NO: 44522 - DNA, 20 bp, Artificial Sequence
  Synthetic
ttccctacatgatgtacatt

SEQ ID NO: 44523 - DNA, 20 bp, Artificial Sequence
  Synthetic
agaccaaatgtacatcatgt

SEQ ID NO: 44524 - DNA, 20 bp, Artificial Sequence
  Synthetic
gaccaaatgtacatcatgta

SEQ ID NO: 44525 - DNA, 20 bp, Artificial Sequence
  Synthetic
atctcatgagtgggataagg

SEQ ID NO: 44526 - DNA, 20 bp, Artificial Sequence
  Synthetic
tccatctcatgagtgggata

SEQ ID NO: 44527 - DNA, 20 bp, Artificial Sequence
  Synthetic
tggccatccatctcatgagt

SEQ ID NO: 44528 - DNA, 20 bp, Artificial Sequence
  Synthetic
gtggccatccatctcatgag

SEQ ID NO: 44529 - DNA, 20 bp, Artificial Sequence
  Synthetic
tccttatcccactcatgaga

SEQ ID NO: 44530 - DNA, 20 bp, Artificial Sequence
  Synthetic
tatcccactcatgagatgga

SEQ ID NO: 44531 - DNA, 20 bp, Artificial Sequence
  Synthetic
gagatggatggccacttcat

SEQ ID NO: 44532 - DNA, 20 bp, Artificial Sequence
  Synthetic
tagaggtggctcccatgaag

SEQ ID NO: 44533 - DNA, 20 bp, Artificial Sequence
  Synthetic
tgagatggatggccacttca

SEQ ID NO: 44534 - DNA, 20 bp, Artificial Sequence
  Synthetic
attgggtggtaatctagagg

SEQ ID NO: 44535 - DNA, 20 bp, Artificial Sequence
  Synthetic
cagattgggtggtaatctag

SEQ ID NO: 44536 - DNA, 20 bp, Artificial Sequence
  Synthetic
tttggattgctcagattggg

SEQ ID NO: 44537 - DNA, 20 bp, Artificial Sequence
  Synthetic
atgtttggattgctcagatt

SEQ ID NO: 44538 - DNA, 20 bp, Artificial Sequence
  Synthetic
catgtttggattgctcagat

SEQ ID NO: 44539 - DNA, 20 bp, Artificial Sequence
  Synthetic
caatctgagcaatccaaaca

SEQ ID NO: 44540 - DNA, 20 bp, Artificial Sequence
  Synthetic
ccaaacatggactataaaaa

SEQ ID NO: 44541 - DNA, 20 bp, Artificial Sequence
  Synthetic
tagttatggattatgtgaga

SEQ ID NO: 44542 - DNA, 20 bp, Artificial Sequence
  Synthetic
ccggagctgcactgtagtta

SEQ ID NO: 44543 - DNA, 20 bp, Artificial Sequence
  Synthetic
ccataactacagtgcagctc

SEQ ID NO: 44544 - DNA, 20 bp, Artificial Sequence
  Synthetic
cataactacagtgcagctcc

SEQ ID NO: 44545 - DNA, 20 bp, Artificial Sequence
  Synthetic
agagagctgttgaacatgcc

SEQ ID NO: 44546 - DNA, 20 bp, Artificial Sequence
  Synthetic
tgccctgcatctccaaaaca

SEQ ID NO: 44547 - DNA, 20 bp, Artificial Sequence
  Synthetic
gcatgtcattctccttgttt

SEQ ID NO: 44548 - DNA, 20 bp, Artificial Sequence
  Synthetic
ttgataacccattagctgtg

SEQ ID NO: 44549 - DNA, 20 bp, Artificial Sequence
  Synthetic
tgataacccattagctgtgt

SEQ ID NO: 44550 - DNA, 20 bp, Artificial Sequence
  Synthetic
atgctttcccacacagctaa

SEQ ID NO: 44551 - DNA, 20 bp, Artificial Sequence
  Synthetic
tgctttcccacacagctaat

SEQ ID NO: 44552 - DNA, 20 bp, Artificial Sequence
  Synthetic
gttctatcatggttaagagc

SEQ ID NO: 44553 - DNA, 20 bp, Artificial Sequence
  Synthetic
ggacacaagcagttctatca

SEQ ID NO: 44554 - DNA, 20 bp, Artificial Sequence
  Synthetic
gatagaactgcttgtgtcca

SEQ ID NO: 44555 - DNA, 20 bp, Artificial Sequence
  Synthetic
agaactgcttgtgtccaagg

SEQ ID NO: 44556 - DNA, 20 bp, Artificial Sequence
  Synthetic
ttaatttgtgtaagcctcct

SEQ ID NO: 44557 - DNA, 20 bp, Artificial Sequence
  Synthetic
cacaaattaagtgatgctaa

SEQ ID NO: 44558 - DNA, 20 bp, Artificial Sequence
  Synthetic
attaagtgatgctaatggtc

SEQ ID NO: 44559 - DNA, 20 bp, Artificial Sequence
  Synthetic
tggtcaggaaaagcagccat

SEQ ID NO: 44560 - DNA, 20 bp, Artificial Sequence
  Synthetic
acaccctggactagtgccaa

SEQ ID NO: 44561 - DNA, 20 bp, Artificial Sequence
  Synthetic
gcagccattggcactagtcc

SEQ ID NO: 44562 - DNA, 20 bp, Artificial Sequence
  Synthetic
cagccattggcactagtcca

SEQ ID NO: 44563 - DNA, 20 bp, Artificial Sequence
  Synthetic
ctgcaccagaagccacaccc

SEQ ID NO: 44564 - DNA, 20 bp, Artificial Sequence
  Synthetic
attggcactagtccagggtg

SEQ ID NO: 44565 - DNA, 20 bp, Artificial Sequence
  Synthetic
ctagtccagggtgtggcttc

SEQ ID NO: 44566 - DNA, 20 bp, Artificial Sequence
  Synthetic
tggtgcagaggacaacgatg

SEQ ID NO: 44567 - DNA, 20 bp, Artificial Sequence
  Synthetic
cagaggacaacgatgaggtc

SEQ ID NO: 44568 - DNA, 20 bp, Artificial Sequence
  Synthetic
agacagcgagcagagctttc

SEQ ID NO: 44569 - DNA, 20 bp, Artificial Sequence
  Synthetic
agctttctggatcctgacat

SEQ ID NO: 44570 - DNA, 20 bp, Artificial Sequence
  Synthetic
acggccactcccccaatgtc

SEQ ID NO: 44571 - DNA, 20 bp, Artificial Sequence
  Synthetic
gctttctggatcctgacatt

SEQ ID NO: 44572 - DNA, 20 bp, Artificial Sequence
  Synthetic
tttctggatcctgacattgg

SEQ ID NO: 44573 - DNA, 20 bp, Artificial Sequence
  Synthetic
ctttctggatcctgacattg

SEQ ID NO: 44574 - DNA, 20 bp, Artificial Sequence
  Synthetic
ggatcctgacattgggggag

SEQ ID NO: 44575 - DNA, 20 bp, Artificial Sequence
  Synthetic
tgacattgggggagtggccg

SEQ ID NO: 44576 - DNA, 20 bp, Artificial Sequence
  Synthetic
tgacccatgagttggagcca

SEQ ID NO: 44577 - DNA, 20 bp, Artificial Sequence
  Synthetic
gtggccgtggctccaactca

SEQ ID NO: 44578 - DNA, 20 bp, Artificial Sequence
  Synthetic
tggccgtggctccaactcat

SEQ ID NO: 44579 - DNA, 20 bp, Artificial Sequence
  Synthetic
atgagaattgacccatgagt

SEQ ID NO: 44580 - DNA, 20 bp, Artificial Sequence
  Synthetic
gggattctttaaaggggttg

SEQ ID NO: 44581 - DNA, 20 bp, Artificial Sequence
  Synthetic
cctattgggattctttaaag

SEQ ID NO: 44582 - DNA, 20 bp, Artificial Sequence
  Synthetic
tcctattgggattctttaaa

SEQ ID NO: 44583 - DNA, 20 bp, Artificial Sequence
  Synthetic
ttcctattgggattctttaa

SEQ ID NO: 44584 - DNA, 20 bp, Artificial Sequence
  Synthetic
cccctttaaagaatcccaat

SEQ ID NO: 44585 - DNA, 20 bp, Artificial Sequence
  Synthetic
cctggtggggtgattcctat

SEQ ID NO: 44586 - DNA, 20 bp, Artificial Sequence
  Synthetic
ctggtggggtgattcctatt

SEQ ID NO: 44587 - DNA, 20 bp, Artificial Sequence
  Synthetic
agacgagggagatcctggtg

SEQ ID NO: 44588 - DNA, 20 bp, Artificial Sequence
  Synthetic
ccaataggaatcaccccacc

SEQ ID NO: 44589 - DNA, 20 bp, Artificial Sequence
  Synthetic
aagacgagggagatcctggt

SEQ ID NO: 44590 - DNA, 20 bp, Artificial Sequence
  Synthetic
aaagacgagggagatcctgg

SEQ ID NO: 44591 - DNA, 20 bp, Artificial Sequence
  Synthetic
gtaaaagacgagggagatcc

SEQ ID NO: 44592 - DNA, 20 bp, Artificial Sequence
  Synthetic
tcttatgctggtaaaagacg

SEQ ID NO: 44593 - DNA, 20 bp, Artificial Sequence
  Synthetic
cttatgctggtaaaagacga

SEQ ID NO: 44594 - DNA, 20 bp, Artificial Sequence
  Synthetic
gctcattcatgctcttatgc

SEQ ID NO: 44595 - DNA, 20 bp, Artificial Sequence
  Synthetic
gtggagatggtcgaaagaaa

SEQ ID NO: 44596 - DNA, 20 bp, Artificial Sequence
  Synthetic
atggtcgaaagaaacggaaa

SEQ ID NO: 44597 - DNA, 20 bp, Artificial Sequence
  Synthetic
cgaaagaaacggaaacggtg

SEQ ID NO: 44598 - DNA, 20 bp, Artificial Sequence
  Synthetic
gtggtacttgtgagccctgc

SEQ ID NO: 44599 - DNA, 20 bp, Artificial Sequence
  Synthetic
gtacttgtgagccctgccgg

SEQ ID NO: 44600 - DNA, 20 bp, Artificial Sequence
  Synthetic
ttgtgagccctgccggcggc

SEQ ID NO: 44601 - DNA, 20 bp, Artificial Sequence
  Synthetic
cagttttccagccgccggca

SEQ ID NO: 44602 - DNA, 20 bp, Artificial Sequence
  Synthetic
acagttttccagccgccggc

SEQ ID NO: 44603 - DNA, 20 bp, Artificial Sequence
  Synthetic
tgccggcggctggaaaactg

SEQ ID NO: 44604 - DNA, 20 bp, Artificial Sequence
  Synthetic
cgccacagttttccagccgc

SEQ ID NO: 44605 - DNA, 20 bp, Artificial Sequence
  Synthetic
gatctggtgcgtgcggcggt

SEQ ID NO: 44606 - DNA, 20 bp, Artificial Sequence
  Synthetic
tgcagatctggtgcgtgcgg

SEQ ID NO: 44607 - DNA, 20 bp, Artificial Sequence
  Synthetic
gtttgcagatctggtgcgtg

SEQ ID NO: 44608 - DNA, 20 bp, Artificial Sequence
  Synthetic
attttcgcagtttgcagatc

SEQ ID NO: 44609 - DNA, 20 bp, Artificial Sequence
  Synthetic
ctgcaaactgcgaaaatgtg

SEQ ID NO: 44610 - DNA, 20 bp, Artificial Sequence
  Synthetic
ggcagtaaagaaataaaagt

SEQ ID NO: 44611 - DNA, 20 bp, Artificial Sequence
  Synthetic
ttactgccatgaaatgagcc

SEQ ID NO: 44612 - DNA, 20 bp, Artificial Sequence
  Synthetic
gaaaagccaggctcatttca

SEQ ID NO: 44613 - DNA, 20 bp, Artificial Sequence
  Synthetic
gaacagggtcttgaaaagcc

SEQ ID NO: 44614 - DNA, 20 bp, Artificial Sequence
  Synthetic
tacttacagttagaggaaca

SEQ ID NO: 44615 - DNA, 20 bp, Artificial Sequence
  Synthetic
atacttacagttagaggaac

SEQ ID NO: 44616 - DNA, 20 bp, Artificial Sequence
  Synthetic
acattaatacttacagttag

SEQ ID NO: 44617 - DNA, 20 bp, Artificial Sequence
  Synthetic
ttaattattttgtaataatc

SEQ ID NO: 44618 - DNA, 20 bp, Artificial Sequence
  Synthetic
caaaataattaaaaatccaa

SEQ ID NO: 44619 - DNA, 20 bp, Artificial Sequence
  Synthetic
ttgatggttgacaaatccat

SEQ ID NO: 44620 - DNA, 20 bp, Artificial Sequence
  Synthetic
ttcttgtagtcttttcttga

SEQ ID NO: 44621 - DNA, 20 bp, Artificial Sequence
  Synthetic
atcttcaggttttgagtaca

SEQ ID NO: 44622 - DNA, 20 bp, Artificial Sequence
  Synthetic
aaatcagctacaaaatcttc

SEQ ID NO: 44623 - DNA, 20 bp, Artificial Sequence
  Synthetic
aaactgtgctgaattcaatg

SEQ ID NO: 44624 - DNA, 20 bp, Artificial Sequence
  Synthetic
gcattggctacttctgaatc

SEQ ID NO: 44625 - DNA, 20 bp, Artificial Sequence
  Synthetic
gattcagaagtagccaatgc

SEQ ID NO: 44626 - DNA, 20 bp, Artificial Sequence
  Synthetic
tggtgtgcagtttgtcaaaa

SEQ ID NO: 44627 - DNA, 20 bp, Artificial Sequence
  Synthetic
tgtgcagtttgtcaaaacgg

SEQ ID NO: 44628 - DNA, 20 bp, Artificial Sequence
  Synthetic
gtgcagtttgtcaaaacgga

SEQ ID NO: 44629 - DNA, 20 bp, Artificial Sequence
  Synthetic
tgcagtttgtcaaaacggag

SEQ ID NO: 44630 - DNA, 20 bp, Artificial Sequence
  Synthetic
tggggcacttttcacagcag

SEQ ID NO: 44631 - DNA, 20 bp, Artificial Sequence
  Synthetic
aagaaagatggaatactttg

SEQ ID NO: 44632 - DNA, 20 bp, Artificial Sequence
  Synthetic
caagaaagatggaatacttt

SEQ ID NO: 44633 - DNA, 20 bp, Artificial Sequence
  Synthetic
acaagaaagatggaatactt

SEQ ID NO: 44634 - DNA, 20 bp, Artificial Sequence
  Synthetic
tgggcacatgacaagaaaga

SEQ ID NO: 44635 - DNA, 20 bp, Artificial Sequence
  Synthetic
cttggaaaatttgtcaatgt

SEQ ID NO: 44636 - DNA, 20 bp, Artificial Sequence
  Synthetic
ccttggaaaatttgtcaatg

SEQ ID NO: 44637 - DNA, 20 bp, Artificial Sequence
  Synthetic
ccacattgacaaattttcca

SEQ ID NO: 44638 - DNA, 20 bp, Artificial Sequence
  Synthetic
tgtcccctaacagtggagag

SEQ ID NO: 44639 - DNA, 20 bp, Artificial Sequence
  Synthetic
ctggcagacacggcaaatgg

SEQ ID NO: 44640 - DNA, 20 bp, Artificial Sequence
  Synthetic
cttctggcagacacggcaaa

SEQ ID NO: 44641 - DNA, 20 bp, Artificial Sequence
  Synthetic
tgccgtgtctgccagaagcc

SEQ ID NO: 44642 - DNA, 20 bp, Artificial Sequence
  Synthetic
cgcctggcttctggcagaca

SEQ ID NO: 44643 - DNA, 20 bp, Artificial Sequence
  Synthetic
ctgccagaagccaggcgatc

SEQ ID NO: 44644 - DNA, 20 bp, Artificial Sequence
  Synthetic
taaccagatcgcctggcttc

SEQ ID NO: 44645 - DNA, 20 bp, Artificial Sequence
  Synthetic
ttgcacataaccagatcgcc

SEQ ID NO: 44646 - DNA, 20 bp, Artificial Sequence
  Synthetic
ggtggaaacaaaactcacac

SEQ ID NO: 44647 - DNA, 20 bp, Artificial Sequence
  Synthetic
gtgtgagttttgtttccacc

SEQ ID NO: 44648 - DNA, 20 bp, Artificial Sequence
  Synthetic
ccggcaggtgacagtccagg

SEQ ID NO: 44649 - DNA, 20 bp, Artificial Sequence
  Synthetic
ccacctggactgtcacctgc

SEQ ID NO: 44650 - DNA, 20 bp, Artificial Sequence
  Synthetic
gggccggcaggtgacagtcc

SEQ ID NO: 44651 - DNA, 20 bp, Artificial Sequence
  Synthetic
ctgtcacctgccggccctgc

SEQ ID NO: 44652 - DNA, 20 bp, Artificial Sequence
  Synthetic
gtacatcctgcagggccggc

SEQ ID NO: 44653 - DNA, 20 bp, Artificial Sequence
  Synthetic
cctggtacatcctgcagggc

SEQ ID NO: 44654 - DNA, 20 bp, Artificial Sequence
  Synthetic
ccggccctgcaggatgtacc

SEQ ID NO: 44655 - DNA, 20 bp, Artificial Sequence
  Synthetic
cggccctgcaggatgtacca

SEQ ID NO: 44656 - DNA, 20 bp, Artificial Sequence
  Synthetic
tcaccctggtacatcctgca

SEQ ID NO: 44657 - DNA, 20 bp, Artificial Sequence
  Synthetic
ctcaccctggtacatcctgc

SEQ ID NO: 44658 - DNA, 20 bp, Artificial Sequence
  Synthetic
ttcttcaccctagggaggag

SEQ ID NO: 44659 - DNA, 20 bp, Artificial Sequence
  Synthetic
tacttaattcatggcaatag

SEQ ID NO: 44660 - DNA, 20 bp, Artificial Sequence
  Synthetic
ggaattcaatacttaattca

SEQ ID NO: 44661 - DNA, 20 bp, Artificial Sequence
  Synthetic
tgaattaagtattgaattcc

SEQ ID NO: 44662 - DNA, 20 bp, Artificial Sequence
  Synthetic
ccgaagcaggaacaggctcc

SEQ ID NO: 44663 - DNA, 20 bp, Artificial Sequence
  Synthetic
ccaggagcctgttcctgctt

SEQ ID NO: 44664 - DNA, 20 bp, Artificial Sequence
  Synthetic
caactcaccgaagcaggaac

SEQ ID NO: 44665 - DNA, 20 bp, Artificial Sequence
  Synthetic
ggtaggcaactcaccgaagc

SEQ ID NO: 44666 - DNA, 20 bp, Artificial Sequence
  Synthetic
tttataattttatagtagtt

SEQ ID NO: 44667 - DNA, 20 bp, Artificial Sequence
  Synthetic
taaaattataaagaaaccaa

SEQ ID NO: 44668 - DNA, 20 bp, Artificial Sequence
  Synthetic
ttcacggtggataaatccat

SEQ ID NO: 44669 - DNA, 20 bp, Artificial Sequence
  Synthetic
ctgaagcttctttttcacgg

SEQ ID NO: 44670 - DNA, 20 bp, Artificial Sequence
  Synthetic
tttctgaagcttctttttca

SEQ ID NO: 44671 - DNA, 20 bp, Artificial Sequence
  Synthetic
ttcccaacactaccaaatcc

SEQ ID NO: 44672 - DNA, 20 bp, Artificial Sequence
  Synthetic
atccgggatttggtagtgtt

SEQ ID NO: 44673 - DNA, 20 bp, Artificial Sequence
  Synthetic
catccgggatttggtagtgt

SEQ ID NO: 44674 - DNA, 20 bp, Artificial Sequence
  Synthetic
ccacaaagtcatccgggatt

SEQ ID NO: 44675 - DNA, 20 bp, Artificial Sequence
  Synthetic
ccaaatcccggatgactttg

SEQ ID NO: 44676 - DNA, 20 bp, Artificial Sequence
  Synthetic
catcggccacaaagtcatcc

SEQ ID NO: 44677 - DNA, 20 bp, Artificial Sequence
  Synthetic
acatcggccacaaagtcatc

SEQ ID NO: 44678 - DNA, 20 bp, Artificial Sequence
  Synthetic
cttgaagatcaaacggacat

SEQ ID NO: 44679 - DNA, 20 bp, Artificial Sequence
  Synthetic
cacagttcttgaagatcaaa

SEQ ID NO: 44680 - DNA, 20 bp, Artificial Sequence
  Synthetic
tgatcttcaagaactgtgaa

SEQ ID NO: 44681 - DNA, 20 bp, Artificial Sequence
  Synthetic
tggtgtgctgtctgccaaaa

SEQ ID NO: 44682 - DNA, 20 bp, Artificial Sequence
  Synthetic
tgtgctgtctgccaaaacgg

SEQ ID NO: 44683 - DNA, 20 bp, Artificial Sequence
  Synthetic
acaagagatctcctccgttt

SEQ ID NO: 44684 - DNA, 20 bp, Artificial Sequence
  Synthetic
gtgctgcgaaaaatgtccaa

SEQ ID NO: 44685 - DNA, 20 bp, Artificial Sequence
  Synthetic
caagttagatgaaagacctt

SEQ ID NO: 44686 - DNA, 20 bp, Artificial Sequence
  Synthetic
cttggaaagctaagtagtgt

SEQ ID NO: 44687 - DNA, 20 bp, Artificial Sequence
  Synthetic
caacactacttagctttcca

SEQ ID NO: 44688 - DNA, 20 bp, Artificial Sequence
  Synthetic
tttccctgtctagtggggac

SEQ ID NO: 44689 - DNA, 20 bp, Artificial Sequence
  Synthetic
tttgcagaagtgtgagaagc

SEQ ID NO: 44690 - DNA, 20 bp, Artificial Sequence
  Synthetic
gctgaggttattgcagcaca

SEQ ID NO: 44691 - DNA, 20 bp, Artificial Sequence
  Synthetic
gttcatggaagggcaggctg

SEQ ID NO: 44692 - DNA, 20 bp, Artificial Sequence
  Synthetic
tgacaggttcatggaagggc

SEQ ID NO: 44693 - DNA, 20 bp, Artificial Sequence
  Synthetic
gggctgacaggttcatggaa

SEQ ID NO: 44694 - DNA, 20 bp, Artificial Sequence
  Synthetic
ggggctgacaggttcatgga

SEQ ID NO: 44695 - DNA, 20 bp, Artificial Sequence
  Synthetic
ccagggggctgacaggttca

SEQ ID NO: 44696 - DNA, 20 bp, Artificial Sequence
  Synthetic
ccatgaacctgtcagccccc

SEQ ID NO: 44697 - DNA, 20 bp, Artificial Sequence
  Synthetic
ttccttaccagggggctgac

SEQ ID NO: 44698 - DNA, 20 bp, Artificial Sequence
  Synthetic
gcgtggccttccttaccagg

SEQ ID NO: 44699 - DNA, 20 bp, Artificial Sequence
  Synthetic
agcgtggccttccttaccag

SEQ ID NO: 44700 - DNA, 20 bp, Artificial Sequence
  Synthetic
gataatctggtaataatgcc

SEQ ID NO: 44701 - DNA, 20 bp, Artificial Sequence
  Synthetic
tgataatctggtaataatgc

SEQ ID NO: 44702 - DNA, 20 bp, Artificial Sequence
  Synthetic
attattaccagattatcaag

SEQ ID NO: 44703 - DNA, 20 bp, Artificial Sequence
  Synthetic
ccatgggcctcttgataatc

SEQ ID NO: 44704 - DNA, 20 bp, Artificial Sequence
  Synthetic
ccagattatcaagaggccca

SEQ ID NO: 44705 - DNA, 20 bp, Artificial Sequence
  Synthetic
cggatgattgacaggtccat

SEQ ID NO: 44706 - DNA, 20 bp, Artificial Sequence
  Synthetic
ccggatgattgacaggtcca

SEQ ID NO: 44707 - DNA, 20 bp, Artificial Sequence
  Synthetic
ccatggacctgtcaatcatc

SEQ ID NO: 44708 - DNA, 20 bp, Artificial Sequence
  Synthetic
tggacctgtcaatcatccgg

SEQ ID NO: 44709 - DNA, 20 bp, Artificial Sequence
  Synthetic
gcttcctccggatgattgac

SEQ ID NO: 44710 - DNA, 20 bp, Artificial Sequence
  Synthetic
ccttcttttgcagcttcctc

SEQ ID NO: 44711 - DNA, 20 bp, Artificial Sequence
  Synthetic
ccggaggaagctgcaaaaga

SEQ ID NO: 44712 - DNA, 20 bp, Artificial Sequence
  Synthetic
ctggggtggtatagtgagct

SEQ ID NO: 44713 - DNA, 20 bp, Artificial Sequence
  Synthetic
tctggggtggtatagtgagc

SEQ ID NO: 44714 - DNA, 20 bp, Artificial Sequence
  Synthetic
agctcactataccaccccag

SEQ ID NO: 44715 - DNA, 20 bp, Artificial Sequence
  Synthetic
tcactataccaccccagagg

SEQ ID NO: 44716 - DNA, 20 bp, Artificial Sequence
  Synthetic
ctataccaccccagaggagg

SEQ ID NO: 44717 - DNA, 20 bp, Artificial Sequence
  Synthetic
tgataccacctcctctgggg

SEQ ID NO: 44718 - DNA, 20 bp, Artificial Sequence
  Synthetic
atctgataccacctcctctg

SEQ ID NO: 44719 - DNA, 20 bp, Artificial Sequence
  Synthetic
catctgataccacctcctct

SEQ ID NO: 44720 - DNA, 20 bp, Artificial Sequence
  Synthetic
acatctgataccacctcctc

SEQ ID NO: 44721 - DNA, 20 bp, Artificial Sequence
  Synthetic
cagatgtgcgcctcatgttc

SEQ ID NO: 44722 - DNA, 20 bp, Artificial Sequence
  Synthetic
tagcacagttccagaacatg

SEQ ID NO: 44723 - DNA, 20 bp, Artificial Sequence
  Synthetic
cccccatcagcctgactccg

SEQ ID NO: 44724 - DNA, 20 bp, Artificial Sequence
  Synthetic
gcctgactccgaggttgcag

SEQ ID NO: 44725 - DNA, 20 bp, Artificial Sequence
  Synthetic
gcctctgcaacctcggagtc

SEQ ID NO: 44726 - DNA, 20 bp, Artificial Sequence
  Synthetic
gactccgaggttgcagaggc

SEQ ID NO: 44727 - DNA, 20 bp, Artificial Sequence
  Synthetic
gcggccagcctctgcaacct

SEQ ID NO: 44728 - DNA, 20 bp, Artificial Sequence
  Synthetic
ttctgtgctgtttgcctcaa

SEQ ID NO: 44729 - DNA, 20 bp, Artificial Sequence
  Synthetic
tgtgctgtttgcctcaatgg

SEQ ID NO: 44730 - DNA, 20 bp, Artificial Sequence
  Synthetic
acagtaactctccgccattg

SEQ ID NO: 44731 - DNA, 20 bp, Artificial Sequence
  Synthetic
ggtggaacactttggggcag

SEQ ID NO: 44732 - DNA, 20 bp, Artificial Sequence
  Synthetic
aggagaggtggaacactttg

SEQ ID NO: 44733 - DNA, 20 bp, Artificial Sequence
  Synthetic
caggagaggtggaacacttt

SEQ ID NO: 44734 - DNA, 20 bp, Artificial Sequence
  Synthetic
gcaggagaggtggaacactt

SEQ ID NO: 44735 - DNA, 20 bp, Artificial Sequence
  Synthetic
ctggcacatggcaggagagg

SEQ ID NO: 44736 - DNA, 20 bp, Artificial Sequence
  Synthetic
aggctggcacatggcaggag

SEQ ID NO: 44737 - DNA, 20 bp, Artificial Sequence
  Synthetic
gagcaaggctggcacatggc

SEQ ID NO: 44738 - DNA, 20 bp, Artificial Sequence
  Synthetic
agctgagcaaggctggcaca

SEQ ID NO: 44739 - DNA, 20 bp, Artificial Sequence
  Synthetic
cctgggaagctgagcaaggc

SEQ ID NO: 44740 - DNA, 20 bp, Artificial Sequence
  Synthetic
ccagccttgctcagcttccc

SEQ ID NO: 44741 - DNA, 20 bp, Artificial Sequence
  Synthetic
cagccttgctcagcttccca

SEQ ID NO: 44742 - DNA, 20 bp, Artificial Sequence
  Synthetic
tcaccctgggaagctgagca

SEQ ID NO: 44743 - DNA, 20 bp, Artificial Sequence
  Synthetic
ggactggcatgactcaccct

SEQ ID NO: 44744 - DNA, 20 bp, Artificial Sequence
  Synthetic
cctgcccctgcaggggagag

SEQ ID NO: 44745 - DNA, 20 bp, Artificial Sequence
  Synthetic
ctgcccctgcaggggagagt

SEQ ID NO: 44746 - DNA, 20 bp, Artificial Sequence
  Synthetic
ctgggtcaggctgcggcaca

SEQ ID NO: 44747 - DNA, 20 bp, Artificial Sequence
  Synthetic
tctcgggctgggtcaggctg

SEQ ID NO: 44748 - DNA, 20 bp, Artificial Sequence
  Synthetic
gaggatggagagcatcctgc

SEQ ID NO: 44749 - DNA, 20 bp, Artificial Sequence
  Synthetic
ggagagcatcctgcaggcac

SEQ ID NO: 44750 - DNA, 20 bp, Artificial Sequence
  Synthetic
gagcatcctgcaggcactgg

SEQ ID NO: 44751 - DNA, 20 bp, Artificial Sequence
  Synthetic
gaatatcctccagtgcctgc

SEQ ID NO: 44752 - DNA, 20 bp, Artificial Sequence
  Synthetic
ggcactggaggatattcagc

SEQ ID NO: 44753 - DNA, 20 bp, Artificial Sequence
  Synthetic
ggaggatattcagctggatc

SEQ ID NO: 44754 - DNA, 20 bp, Artificial Sequence
  Synthetic
ggatattcagctggatctgg

SEQ ID NO: 44755 - DNA, 20 bp, Artificial Sequence
  Synthetic
tctggaggcagtgaacatca

SEQ ID NO: 44756 - DNA, 20 bp, Artificial Sequence
  Synthetic
gaggcagtgaacatcaaggc

SEQ ID NO: 44757 - DNA, 20 bp, Artificial Sequence
  Synthetic
cttgcgcttgagacgcagga

SEQ ID NO: 44758 - DNA, 20 bp, Artificial Sequence
  Synthetic
tgaacttgcgcttgagacgc

SEQ ID NO: 44759 - DNA, 20 bp, Artificial Sequence
  Synthetic
ccaggaagggtcttcgcatc

SEQ ID NO: 44760 - DNA, 20 bp, Artificial Sequence
  Synthetic
ccagatgcgaagacccttcc

SEQ ID NO: 44761 - DNA, 20 bp, Artificial Sequence
  Synthetic
aggtctctgcgctccaggaa

SEQ ID NO: 44762 - DNA, 20 bp, Artificial Sequence
  Synthetic
gaggtctctgcgctccagga

SEQ ID NO: 44763 - DNA, 20 bp, Artificial Sequence
  Synthetic
tgatgaggtctctgcgctcc

SEQ ID NO: 44764 - DNA, 20 bp, Artificial Sequence
  Synthetic
ctgggatatgctggatgatg

SEQ ID NO: 44765 - DNA, 20 bp, Artificial Sequence
  Synthetic
ctcatcatccagcatatccc

SEQ ID NO: 44766 - DNA, 20 bp, Artificial Sequence
  Synthetic
tccagcatatcccaggcttc

SEQ ID NO: 44767 - DNA, 20 bp, Artificial Sequence
  Synthetic
cccagaagcctgggatatgc

SEQ ID NO: 44768 - DNA, 20 bp, Artificial Sequence
  Synthetic
ccagcatatcccaggcttct

SEQ ID NO: 44769 - DNA, 20 bp, Artificial Sequence
  Synthetic
ctgctttgacccagaagcct

SEQ ID NO: 44770 - DNA, 20 bp, Artificial Sequence
  Synthetic
actgctttgacccagaagcc

SEQ ID NO: 44771 - DNA, 20 bp, Artificial Sequence
  Synthetic
ttgaaattctggggtggttg

SEQ ID NO: 44772 - DNA, 20 bp, Artificial Sequence
  Synthetic
tcaaaattgaaattctgggg

SEQ ID NO: 44773 - DNA, 20 bp, Artificial Sequence
  Synthetic
tgatcaaaattgaaattctg

SEQ ID NO: 44774 - DNA, 20 bp, Artificial Sequence
  Synthetic
ttgatcaaaattgaaattct

SEQ ID NO: 44775 - DNA, 20 bp, Artificial Sequence
  Synthetic
gttgatcaaaattgaaattc

SEQ ID NO: 44776 - DNA, 20 bp, Artificial Sequence
  Synthetic
ggaaaatgtcttcatcacgt

SEQ ID NO: 44777 - DNA, 20 bp, Artificial Sequence
  Synthetic
cctgcagattggtcaagtag

SEQ ID NO: 44778 - DNA, 20 bp, Artificial Sequence
  Synthetic
ccgctacttgaccaatctgc

SEQ ID NO: 44779 - DNA, 20 bp, Artificial Sequence
  Synthetic
ctctggcctgacctgcagat

SEQ ID NO: 44780 - DNA, 20 bp, Artificial Sequence
  Synthetic
cccccacctggagcaggtac

SEQ ID NO: 44781 - DNA, 20 bp, Artificial Sequence
  Synthetic
ggatctcagacatatctcca

SEQ ID NO: 44782 - DNA, 20 bp, Artificial Sequence
  Synthetic
gatctcagacatatctccat

SEQ ID NO: 44783 - DNA, 20 bp, Artificial Sequence
  Synthetic
cagcttcattttgtagccca

SEQ ID NO: 44784 - DNA, 20 bp, Artificial Sequence
  Synthetic
ttgtgaagtaggggttagtc

SEQ ID NO: 44785 - DNA, 20 bp, Artificial Sequence
  Synthetic
taacccctacttcacaaaca

SEQ ID NO: 44786 - DNA, 20 bp, Artificial Sequence
  Synthetic
tcaccatgtttgtgaagtag

SEQ ID NO: 44787 - DNA, 20 bp, Artificial Sequence
  Synthetic
atcaccatgtttgtgaagta

SEQ ID NO: 44788 - DNA, 20 bp, Artificial Sequence
  Synthetic
aatcaccatgtttgtgaagt

SEQ ID NO: 44789 - DNA, 20 bp, Artificial Sequence
  Synthetic
cacaaacatggtgattgtca

SEQ ID NO: 44790 - DNA, 20 bp, Artificial Sequence
  Synthetic
gagttccagcgcaaccgctc

SEQ ID NO: 44791 - DNA, 20 bp, Artificial Sequence
  Synthetic
acttacctgagcggttgcgc

SEQ ID NO: 44792 - DNA, 20 bp, Artificial Sequence
  Synthetic
ggtactgccacttacctgag

SEQ ID NO: 44793 - DNA, 20 bp, Artificial Sequence
  Synthetic
ttctctctccctaggccggc

SEQ ID NO: 44794 - DNA, 20 bp, Artificial Sequence
  Synthetic
gggttgagtgagacaccagc

SEQ ID NO: 44795 - DNA, 20 bp, Artificial Sequence
  Synthetic
ctcactcaaccccaatccgc

SEQ ID NO: 44796 - DNA, 20 bp, Artificial Sequence
  Synthetic
caaccccaatccgctggcac

SEQ ID NO: 44797 - DNA, 20 bp, Artificial Sequence
  Synthetic
aaccccaatccgctggcacc

SEQ ID NO: 44798 - DNA, 20 bp, Artificial Sequence
  Synthetic
accccaatccgctggcaccg

SEQ ID NO: 44799 - DNA, 20 bp, Artificial Sequence
  Synthetic
gccccggtgccagcggattg

SEQ ID NO: 44800 - DNA, 20 bp, Artificial Sequence
  Synthetic
ggccccggtgccagcggatt

SEQ ID NO: 44801 - DNA, 20 bp, Artificial Sequence
  Synthetic
tggccccggtgccagcggat

SEQ ID NO: 44802 - DNA, 20 bp, Artificial Sequence
  Synthetic
aatccgctggcaccggggcc

SEQ ID NO: 44803 - DNA, 20 bp, Artificial Sequence
  Synthetic
gttcctggccccggtgccag

SEQ ID NO: 44804 - DNA, 20 bp, Artificial Sequence
  Synthetic
gcaccggggccaggaacccc

SEQ ID NO: 44805 - DNA, 20 bp, Artificial Sequence
  Synthetic
gggcctggggttcctggccc

SEQ ID NO: 44806 - DNA, 20 bp, Artificial Sequence
  Synthetic
gacgacgggcctggggttcc

SEQ ID NO: 44807 - DNA, 20 bp, Artificial Sequence
  Synthetic
gaaccccaggcccgtcgtca

SEQ ID NO: 44808 - DNA, 20 bp, Artificial Sequence
  Synthetic
aaccccaggcccgtcgtcac

SEQ ID NO: 44809 - DNA, 20 bp, Artificial Sequence
  Synthetic
ttcccgtgacgacgggcctg

SEQ ID NO: 44810 - DNA, 20 bp, Artificial Sequence
  Synthetic
gttcccgtgacgacgggcct

SEQ ID NO: 44811 - DNA, 20 bp, Artificial Sequence
  Synthetic
ggttcccgtgacgacgggcc

SEQ ID NO: 44812 - DNA, 20 bp, Artificial Sequence
  Synthetic
ggcccgtcgtcacgggaacc

SEQ ID NO: 44813 - DNA, 20 bp, Artificial Sequence
  Synthetic
atcctggttcccgtgacgac

SEQ ID NO: 44814 - DNA, 20 bp, Artificial Sequence
  Synthetic
catcctggttcccgtgacga

SEQ ID NO: 44815 - DNA, 20 bp, Artificial Sequence
  Synthetic
aaaagctgtggctcgcatcc

SEQ ID NO: 44816 - DNA, 20 bp, Artificial Sequence
  Synthetic
cgagccacagctttttcagc

SEQ ID NO: 44817 - DNA, 20 bp, Artificial Sequence
  Synthetic
agaaccagctgaaaaagctg

SEQ ID NO: 44818 - DNA, 20 bp, Artificial Sequence
  Synthetic
ctcaaaccatagcctcccag

SEQ ID NO: 44819 - DNA, 20 bp, Artificial Sequence
  Synthetic
tgtcagcctctgggaggcta

SEQ ID NO: 44820 - DNA, 20 bp, Artificial Sequence
  Synthetic
atagcctcccagaggctgac

SEQ ID NO: 44821 - DNA, 20 bp, Artificial Sequence
  Synthetic
caatcctgtcagcctctggg

SEQ ID NO: 44822 - DNA, 20 bp, Artificial Sequence
  Synthetic
cagcaatcctgtcagcctct

SEQ ID NO: 44823 - DNA, 20 bp, Artificial Sequence
  Synthetic
tcagcaatcctgtcagcctc

SEQ ID NO: 44824 - DNA, 20 bp, Artificial Sequence
  Synthetic
agaggctgacaggattgctg

SEQ ID NO: 44825 - DNA, 20 bp, Artificial Sequence
  Synthetic
ggctgacaggattgctgagg

SEQ ID NO: 44826 - DNA, 20 bp, Artificial Sequence
  Synthetic
gctgacaggattgctgaggt

SEQ ID NO: 44827 - DNA, 20 bp, Artificial Sequence
  Synthetic
agattatcaagaatgatctg

SEQ ID NO: 44828 - DNA, 20 bp, Artificial Sequence
  Synthetic
gattatcaagaatgatctgt

SEQ ID NO: 44829 - DNA, 20 bp, Artificial Sequence
  Synthetic
ctctcaggtagtagcgtaga

SEQ ID NO: 44830 - DNA, 20 bp, Artificial Sequence
  Synthetic
tctctcaggtagtagcgtag

SEQ ID NO: 44831 - DNA, 20 bp, Artificial Sequence
  Synthetic
tacgctactacctgagagaa

SEQ ID NO: 44832 - DNA, 20 bp, Artificial Sequence
  Synthetic
acgctactacctgagagaaa

SEQ ID NO: 44833 - DNA, 20 bp, Artificial Sequence
  Synthetic
cgctactacctgagagaaag

SEQ ID NO: 44834 - DNA, 20 bp, Artificial Sequence
  Synthetic
tcctggagcccctttctctc

SEQ ID NO: 44835 - DNA, 20 bp, Artificial Sequence
  Synthetic
gtctgcgcctgccacctgtg

SEQ ID NO: 44836 - DNA, 20 bp, Artificial Sequence
  Synthetic
tctgcgcctgccacctgtgc

SEQ ID NO: 44837 - DNA, 20 bp, Artificial Sequence
  Synthetic
ctgcgcctgccacctgtgcg

SEQ ID NO: 44838 - DNA, 20 bp, Artificial Sequence
  Synthetic
tgcgcctgccacctgtgcgg

SEQ ID NO: 44839 - DNA, 20 bp, Artificial Sequence
  Synthetic
ccggcccccgcacaggtggc

SEQ ID NO: 44840 - DNA, 20 bp, Artificial Sequence
  Synthetic
cctgccacctgtgcgggggc

SEQ ID NO: 44841 - DNA, 20 bp, Artificial Sequence
  Synthetic
cctgccggcccccgcacagg

SEQ ID NO: 44842 - DNA, 20 bp, Artificial Sequence
  Synthetic
ccacctgtgcgggggccggc

SEQ ID NO: 44843 - DNA, 20 bp, Artificial Sequence
  Synthetic
ggtcctgccggcccccgcac

SEQ ID NO: 44844 - DNA, 20 bp, Artificial Sequence
  Synthetic
gctgcttgtcggggtcctgc

SEQ ID NO: 44845 - DNA, 20 bp, Artificial Sequence
  Synthetic
cgcacatgagctgcttgtcg

SEQ ID NO: 44846 - DNA, 20 bp, Artificial Sequence
  Synthetic
tcgcacatgagctgcttgtc

SEQ ID NO: 44847 - DNA, 20 bp, Artificial Sequence
  Synthetic
atcgcacatgagctgcttgt

SEQ ID NO: 44848 - DNA, 20 bp, Artificial Sequence
  Synthetic
catgtgcgatgagtgcgaca

SEQ ID NO: 44849 - DNA, 20 bp, Artificial Sequence
  Synthetic
ggccttccacatctactgcc

SEQ ID NO: 44850 - DNA, 20 bp, Artificial Sequence
  Synthetic
gtccaggcagtagatgtgga

SEQ ID NO: 44851 - DNA, 20 bp, Artificial Sequence
  Synthetic
gcgggtccaggcagtagatg

SEQ ID NO: 44852 - DNA, 20 bp, Artificial Sequence
  Synthetic
cactgctgaggggcgggtcc

SEQ ID NO: 44853 - DNA, 20 bp, Artificial Sequence
  Synthetic
tgggaacactgctgaggggc

SEQ ID NO: 44854 - DNA, 20 bp, Artificial Sequence
  Synthetic
ctgggaacactgctgagggg

SEQ ID NO: 44855 - DNA, 20 bp, Artificial Sequence
  Synthetic
tcgctgggaacactgctgag

SEQ ID NO: 44856 - DNA, 20 bp, Artificial Sequence
  Synthetic
ctcgctgggaacactgctga

SEQ ID NO: 44857 - DNA, 20 bp, Artificial Sequence
  Synthetic
cctcgctgggaacactgctg

SEQ ID NO: 44858 - DNA, 20 bp, Artificial Sequence
  Synthetic
cctcagcagtgttcccagcg

SEQ ID NO: 44859 - DNA, 20 bp, Artificial Sequence
  Synthetic
gtgttcccagcgaggacgag

SEQ ID NO: 44860 - DNA, 20 bp, Artificial Sequence
  Synthetic
actcaccactcgtcctcgct

SEQ ID NO: 44861 - DNA, 20 bp, Artificial Sequence
  Synthetic
cactcaccactcgtcctcgc

SEQ ID NO: 44862 - DNA, 20 bp, Artificial Sequence
  Synthetic
gcaggtactgccctgagtgc

SEQ ID NO: 44863 - DNA, 20 bp, Artificial Sequence
  Synthetic
tggcatcattccggcactca

SEQ ID NO: 44864 - DNA, 20 bp, Artificial Sequence
  Synthetic
ctggcatcattccggcactc

SEQ ID NO: 44865 - DNA, 20 bp, Artificial Sequence
  Synthetic
ccacctcgctggcatcattc

SEQ ID NO: 44866 - DNA, 20 bp, Artificial Sequence
  Synthetic
tcttgctcctgtcgtgtatg

SEQ ID NO: 44867 - DNA, 20 bp, Artificial Sequence
  Synthetic
tgctcctgtcgtgtatgtgg

SEQ ID NO: 44868 - DNA, 20 bp, Artificial Sequence
  Synthetic
gctcctgtcgtgtatgtggt

SEQ ID NO: 44869 - DNA, 20 bp, Artificial Sequence
  Synthetic
tttcccaccacatacacgac

SEQ ID NO: 44870 - DNA, 20 bp, Artificial Sequence
  Synthetic
tcacacagaagctgcatgtt

SEQ ID NO: 44871 - DNA, 20 bp, Artificial Sequence
  Synthetic
atcacacagaagctgcatgt

SEQ ID NO: 44872 - DNA, 20 bp, Artificial Sequence
  Synthetic
tctgtgtgatgaatgtaatg

SEQ ID NO: 44873 - DNA, 20 bp, Artificial Sequence
  Synthetic
ttactgtctgaatccacctt

SEQ ID NO: 44874 - DNA, 20 bp, Artificial Sequence
  Synthetic
tctgggactttatccaaagg

SEQ ID NO: 44875 - DNA, 20 bp, Artificial Sequence
  Synthetic
tcttctgggactttatccaa

SEQ ID NO: 44876 - DNA, 20 bp, Artificial Sequence
  Synthetic
tttggataaagtcccagaag

SEQ ID NO: 44877 - DNA, 20 bp, Artificial Sequence
  Synthetic
aagtcccagaagaggaatac

SEQ ID NO: 44878 - DNA, 20 bp, Artificial Sequence
  Synthetic
cataccagtattcctcttct

SEQ ID NO: 44879 - DNA, 20 bp, Artificial Sequence
  Synthetic
tcataccagtattcctcttc

SEQ ID NO: 44880 - DNA, 20 bp, Artificial Sequence
  Synthetic
ctggaatcagttttacaaga

SEQ ID NO: 44881 - DNA, 20 bp, Artificial Sequence
  Synthetic
caactgtatatgaaagttcc

SEQ ID NO: 44882 - DNA, 20 bp, Artificial Sequence
  Synthetic
aactgtatatgaaagttcca

SEQ ID NO: 44883 - DNA, 20 bp, Artificial Sequence
  Synthetic
atatgaaagttccagggagt

SEQ ID NO: 44884 - DNA, 20 bp, Artificial Sequence
  Synthetic
gttccagggagtcggacacc

SEQ ID NO: 44885 - DNA, 20 bp, Artificial Sequence
  Synthetic
tcacctggtgtccgactccc

SEQ ID NO: 44886 - DNA, 20 bp, Artificial Sequence
  Synthetic
agcagaagttgttattttct

SEQ ID NO: 44887 - DNA, 20 bp, Artificial Sequence
  Synthetic
tgctctgttaacataaatat

SEQ ID NO: 44888 - DNA, 20 bp, Artificial Sequence
  Synthetic
gttaacataaatattggtcc

SEQ ID NO: 44889 - DNA, 20 bp, Artificial Sequence
  Synthetic
ttggtccaggagattgtgaa

SEQ ID NO: 44890 - DNA, 20 bp, Artificial Sequence
  Synthetic
acaaaccattcacaatctcc

SEQ ID NO: 44891 - DNA, 20 bp, Artificial Sequence
  Synthetic
ttgttgtacctgaagattat

SEQ ID NO: 44892 - DNA, 20 bp, Artificial Sequence
  Synthetic
tgttgtacctgaagattatt

SEQ ID NO: 44893 - DNA, 20 bp, Artificial Sequence
  Synthetic
gttgtacctgaagattattg

SEQ ID NO: 44894 - DNA, 20 bp, Artificial Sequence
  Synthetic
agaacaccccaataatcttc

SEQ ID NO: 44895 - DNA, 20 bp, Artificial Sequence
  Synthetic
gaatgacttctgtgaaaagt

SEQ ID NO: 44896 - DNA, 20 bp, Artificial Sequence
  Synthetic
tgaattttttaatgagttct

SEQ ID NO: 44897 - DNA, 20 bp, Artificial Sequence
  Synthetic
attttttaatgagttcttgg

SEQ ID NO: 44898 - DNA, 20 bp, Artificial Sequence
  Synthetic
tcataaagatcttcaaggtt

SEQ ID NO: 44899 - DNA, 20 bp, Artificial Sequence
  Synthetic
ttcataaagatcttcaaggt

SEQ ID NO: 44900 - DNA, 20 bp, Artificial Sequence
  Synthetic
ttgcttcataaagatcttca

SEQ ID NO: 44901 - DNA, 20 bp, Artificial Sequence
  Synthetic
gctgaataaatctatacaca

SEQ ID NO: 44902 - DNA, 20 bp, Artificial Sequence
  Synthetic
cgctgaataaatctatacac

SEQ ID NO: 44903 - DNA, 20 bp, Artificial Sequence
  Synthetic
tatagatttattcagcgacc

SEQ ID NO: 44904 - DNA, 20 bp, Artificial Sequence
  Synthetic
tattcagcgacctggagatt

SEQ ID NO: 44905 - DNA, 20 bp, Artificial Sequence
  Synthetic
agcgacctggagatttggtc

SEQ ID NO: 44906 - DNA, 20 bp, Artificial Sequence
  Synthetic
tttatccagaccaaatctcc

SEQ ID NO: 44907 - DNA, 20 bp, Artificial Sequence
  Synthetic
gatttggtctggataaatgc

SEQ ID NO: 44908 - DNA, 20 bp, Artificial Sequence
  Synthetic
taaatgcaggcactgtgcat

SEQ ID NO: 44909 - DNA, 20 bp, Artificial Sequence
  Synthetic
aaatgcaggcactgtgcatt

SEQ ID NO: 44910 - DNA, 20 bp, Artificial Sequence
  Synthetic
gtgcattgggttcaagctgt

SEQ ID NO: 44911 - DNA, 20 bp, Artificial Sequence
  Synthetic
attgggttcaagctgttggc

SEQ ID NO: 44912 - DNA, 20 bp, Artificial Sequence
  Synthetic
gctggtgcaataacattgcc

SEQ ID NO: 44913 - DNA, 20 bp, Artificial Sequence
  Synthetic
aataacattgcctggaatgt

SEQ ID NO: 44914 - DNA, 20 bp, Artificial Sequence
  Synthetic
tgtaagtggaccaacattcc

SEQ ID NO: 44915 - DNA, 20 bp, Artificial Sequence
  Synthetic
ccctgttacctgctggatat

SEQ ID NO: 44916 - DNA, 20 bp, Artificial Sequence
  Synthetic
cctgttacctgctggatatt

SEQ ID NO: 44917 - DNA, 20 bp, Artificial Sequence
  Synthetic
aatctcacccaatatccagc

SEQ ID NO: 44918 - DNA, 20 bp, Artificial Sequence
  Synthetic
atgtcttccagctgtggcac

SEQ ID NO: 44919 - DNA, 20 bp, Artificial Sequence
  Synthetic
tgtcttccagctgtggcact

SEQ ID NO: 44920 - DNA, 20 bp, Artificial Sequence
  Synthetic
actcagcccagtgccacagc

SEQ ID NO: 44921 - DNA, 20 bp, Artificial Sequence
  Synthetic
agctgtggcactgggctgag

SEQ ID NO: 44922 - DNA, 20 bp, Artificial Sequence
  Synthetic
ggaagttatctgtcagatga

SEQ ID NO: 44923 - DNA, 20 bp, Artificial Sequence
  Synthetic
gaagttatctgtcagatgaa

SEQ ID NO: 44924 - DNA, 20 bp, Artificial Sequence
  Synthetic
tgtcagatgaagggcactat

SEQ ID NO: 44925 - DNA, 20 bp, Artificial Sequence
  Synthetic
gtcagatgaagggcactatt

SEQ ID NO: 44926 - DNA, 20 bp, Artificial Sequence
  Synthetic
agatgaagggcactattggg

SEQ ID NO: 44927 - DNA, 20 bp, Artificial Sequence
  Synthetic
gatgaagggcactattgggt

SEQ ID NO: 44928 - DNA, 20 bp, Artificial Sequence
  Synthetic
agggcactattgggtgggcc

SEQ ID NO: 44929 - DNA, 20 bp, Artificial Sequence
  Synthetic
gcatggcagggctgatatcc

SEQ ID NO: 44930 - DNA, 20 bp, Artificial Sequence
  Synthetic
ggatatcagccctgccatgc

SEQ ID NO: 44931 - DNA, 20 bp, Artificial Sequence
  Synthetic
gatatcagccctgccatgct

SEQ ID NO: 44932 - DNA, 20 bp, Artificial Sequence
  Synthetic
catacttacccagcatggca

SEQ ID NO: 44933 - DNA, 20 bp, Artificial Sequence
  Synthetic
acatacttacccagcatggc

SEQ ID NO: 44934 - DNA, 20 bp, Artificial Sequence
  Synthetic
caggacatacttacccagca

SEQ ID NO: 44935 - DNA, 20 bp, Artificial Sequence
  Synthetic
ctctaatgtagatgaggctg

SEQ ID NO: 44936 - DNA, 20 bp, Artificial Sequence
  Synthetic
ggctgtggaccgagagatag

SEQ ID NO: 44937 - DNA, 20 bp, Artificial Sequence
  Synthetic
gctgtggaccgagagataga

SEQ ID NO: 44938 - DNA, 20 bp, Artificial Sequence
  Synthetic
gcaggtctccctctatctct

SEQ ID NO: 44939 - DNA, 20 bp, Artificial Sequence
  Synthetic
gatagagggagacctgctgc

SEQ ID NO: 44940 - DNA, 20 bp, Artificial Sequence
  Synthetic
atagagggagacctgctgct

SEQ ID NO: 44941 - DNA, 20 bp, Artificial Sequence
  Synthetic
tagagggagacctgctgctg

SEQ ID NO: 44942 - DNA, 20 bp, Artificial Sequence
  Synthetic
agagggagacctgctgctgg

SEQ ID NO: 44943 - DNA, 20 bp, Artificial Sequence
  Synthetic
agacctgctgctgggggata

SEQ ID NO: 44944 - DNA, 20 bp, Artificial Sequence
  Synthetic
gacctgctgctgggggatat

SEQ ID NO: 44945 - DNA, 20 bp, Artificial Sequence
  Synthetic
ggcccatatcccccagcagc

SEQ ID NO: 44946 - DNA, 20 bp, Artificial Sequence
  Synthetic
gctgctgggggatatgggcc

SEQ ID NO: 44947 - DNA, 20 bp, Artificial Sequence
  Synthetic
ctgctgggggatatgggcca

SEQ ID NO: 44948 - DNA, 20 bp, Artificial Sequence
  Synthetic
ctggcttgaatgggatgccc

SEQ ID NO: 44949 - DNA, 20 bp, Artificial Sequence
  Synthetic
cagggcatcccattcaagcc

SEQ ID NO: 44950 - DNA, 20 bp, Artificial Sequence
  Synthetic
caaatgtgcctggcttgaat

SEQ ID NO: 44951 - DNA, 20 bp, Artificial Sequence
  Synthetic
tcaaatgtgcctggcttgaa

SEQ ID NO: 44952 - DNA, 20 bp, Artificial Sequence
  Synthetic
ttcaagccaggcacatttga

SEQ ID NO: 44953 - DNA, 20 bp, Artificial Sequence
  Synthetic
atgcaaccatcaaatgtgcc

SEQ ID NO: 44954 - DNA, 20 bp, Artificial Sequence
  Synthetic
gcacatttgatggttgcatc

SEQ ID NO: 44955 - DNA, 20 bp, Artificial Sequence
  Synthetic
ttagcatttctgctgtgcag

SEQ ID NO: 44956 - DNA, 20 bp, Artificial Sequence
  Synthetic
ttctacctctgcttgttttc

SEQ ID NO: 44957 - DNA, 20 bp, Artificial Sequence
  Synthetic
tctacctctgcttgttttct

SEQ ID NO: 44958 - DNA, 20 bp, Artificial Sequence
  Synthetic
gccttcgacctttataccag

SEQ ID NO: 44959 - DNA, 20 bp, Artificial Sequence
  Synthetic
acctctggtataaaggtcga

SEQ ID NO: 44960 - DNA, 20 bp, Artificial Sequence
  Synthetic
gtccctcacctctggtataa

SEQ ID NO: 44961 - DNA, 20 bp, Artificial Sequence
  Synthetic
aacccagtgtccctcacctc

SEQ ID NO: 44962 - DNA, 20 bp, Artificial Sequence
  Synthetic
gcaggggctgagtgaaaatc

SEQ ID NO: 44963 - DNA, 20 bp, Artificial Sequence
  Synthetic
atcaggatgaagttgaaccc

SEQ ID NO: 44964 - DNA, 20 bp, Artificial Sequence
  Synthetic
tcaggatgaagttgaaccca

SEQ ID NO: 44965 - DNA, 20 bp, Artificial Sequence
  Synthetic
ttggtgaacacagactccct

SEQ ID NO: 44966 - DNA, 20 bp, Artificial Sequence
  Synthetic
attggtgaacacagactccc

SEQ ID NO: 44967 - DNA, 20 bp, Artificial Sequence
  Synthetic
agtctgtgttcaccaatgag

SEQ ID NO: 44968 - DNA, 20 bp, Artificial Sequence
  Synthetic
gcagttgctttacctctcat

SEQ ID NO: 44969 - DNA, 20 bp, Artificial Sequence
  Synthetic
tccgccacaggttcccatta

SEQ ID NO: 44970 - DNA, 20 bp, Artificial Sequence
  Synthetic
ggttcccattaaggatgtcg

SEQ ID NO: 44971 - DNA, 20 bp, Artificial Sequence
  Synthetic
tcccattaaggatgtcgagg

SEQ ID NO: 44972 - DNA, 20 bp, Artificial Sequence
  Synthetic
cccgcctcgacatccttaat

SEQ ID NO: 44973 - DNA, 20 bp, Artificial Sequence
  Synthetic
cccattaaggatgtcgaggc

SEQ ID NO: 44974 - DNA, 20 bp, Artificial Sequence
  Synthetic
ccccgcctcgacatccttaa

SEQ ID NO: 44975 - DNA, 20 bp, Artificial Sequence
  Synthetic
ccattaaggatgtcgaggcg

SEQ ID NO: 44976 - DNA, 20 bp, Artificial Sequence
  Synthetic
aaggatgtcgaggcggggaa

SEQ ID NO: 44977 - DNA, 20 bp, Artificial Sequence
  Synthetic
tgtcgaggcggggaatggtg

SEQ ID NO: 44978 - DNA, 20 bp, Artificial Sequence
  Synthetic
ggggaatggtgaggaagagt

SEQ ID NO: 44979 - DNA, 20 bp, Artificial Sequence
  Synthetic
gggaatggtgaggaagagtc

SEQ ID NO: 44980 - DNA, 20 bp, Artificial Sequence
  Synthetic
tggtgaggaagagtcgggca

SEQ ID NO: 44981 - DNA, 20 bp, Artificial Sequence
  Synthetic
ggtgaggaagagtcgggcat

SEQ ID NO: 44982 - DNA, 20 bp, Artificial Sequence
  Synthetic
gaagagtcgggcatgggtgc

SEQ ID NO: 44983 - DNA, 20 bp, Artificial Sequence
  Synthetic
ggcatgggtgctggagaaga

SEQ ID NO: 44984 - DNA, 20 bp, Artificial Sequence
  Synthetic
gggtgctggagaagaaggag

SEQ ID NO: 44985 - DNA, 20 bp, Artificial Sequence
  Synthetic
tggagaagaaggagcggcac

SEQ ID NO: 44986 - DNA, 20 bp, Artificial Sequence
  Synthetic
gaaggagcggcacaggcgcc

SEQ ID NO: 44987 - DNA, 20 bp, Artificial Sequence
  Synthetic
aaggagcggcacaggcgcca

SEQ ID NO: 44988 - DNA, 20 bp, Artificial Sequence
  Synthetic
agcggcacaggcgccagggc

SEQ ID NO: 44989 - DNA, 20 bp, Artificial Sequence
  Synthetic
aggctggcactcacctgccc

SEQ ID NO: 44990 - DNA, 20 bp, Artificial Sequence
  Synthetic
agacctgacacccagtacac

SEQ ID NO: 44991 - DNA, 20 bp, Artificial Sequence
  Synthetic
cggccggtgtactgggtgtc

SEQ ID NO: 44992 - DNA, 20 bp, Artificial Sequence
  Synthetic
gcgcttgcggccggtgtact

SEQ ID NO: 44993 - DNA, 20 bp, Artificial Sequence
  Synthetic
tgcgcttgcggccggtgtac

SEQ ID NO: 44994 - DNA, 20 bp, Artificial Sequence
  Synthetic
gcggggcttgcgcttgcggc

SEQ ID NO: 44995 - DNA, 20 bp, Artificial Sequence
  Synthetic
agaagcggggcttgcgcttg

SEQ ID NO: 44996 - DNA, 20 bp, Artificial Sequence
  Synthetic
cgcgtggtgacttagaagcg

SEQ ID NO: 44997 - DNA, 20 bp, Artificial Sequence
  Synthetic
cacggaagccaatgagatat

SEQ ID NO: 44998 - DNA, 20 bp, Artificial Sequence
  Synthetic
aatgagatatgggcatacag

SEQ ID NO: 44999 - DNA, 20 bp, Artificial Sequence
  Synthetic
atgagatatgggcatacaga

SEQ ID NO: 45000 - DNA, 20 bp, Artificial Sequence
  Synthetic
tgggcatacagagggacaca

SEQ ID NO: 45001 - DNA, 20 bp, Artificial Sequence
  Synthetic
gcatacagagggacacacgg

SEQ ID NO: 45002 - DNA, 20 bp, Artificial Sequence
  Synthetic
gaggtctgttttgatgattc

SEQ ID NO: 45003 - DNA, 20 bp, Artificial Sequence
  Synthetic
aggtctgttttgatgattct

SEQ ID NO: 45004 - DNA, 20 bp, Artificial Sequence
  Synthetic
tctgttttgatgattctggg

SEQ ID NO: 45005 - DNA, 20 bp, Artificial Sequence
  Synthetic
cacagttttattgtgacttg

SEQ ID NO: 45006 - DNA, 20 bp, Artificial Sequence
  Synthetic
attgtgacttgtggaagtga

SEQ ID NO: 45007 - DNA, 20 bp, Artificial Sequence
  Synthetic
gtggaagtgatggtgatgtg

SEQ ID NO: 45008 - DNA, 20 bp, Artificial Sequence
  Synthetic
gtgatggtgatgtgaggatt

SEQ ID NO: 45009 - DNA, 20 bp, Artificial Sequence
  Synthetic
tgatggtgatgtgaggattt

SEQ ID NO: 45010 - DNA, 20 bp, Artificial Sequence
  Synthetic
agccaacagaaaacatttcg

SEQ ID NO: 45011 - DNA, 20 bp, Artificial Sequence
  Synthetic
gtcctcgaaatgttttctgt

SEQ ID NO: 45012 - DNA, 20 bp, Artificial Sequence
  Synthetic
aaaggaaagacttaaaacag

SEQ ID NO: 45013 - DNA, 20 bp, Artificial Sequence
  Synthetic
caaaggaaagacttaaaaca

SEQ ID NO: 45014 - DNA, 20 bp, Artificial Sequence
  Synthetic
tcaaaggaaagacttaaaac

SEQ ID NO: 45015 - DNA, 20 bp, Artificial Sequence
  Synthetic
aagtctttcctttgatccta

SEQ ID NO: 45016 - DNA, 20 bp, Artificial Sequence
  Synthetic
aaagatgtccttaggatcaa

SEQ ID NO: 45017 - DNA, 20 bp, Artificial Sequence
  Synthetic
tgatcctaaggacatctttc

SEQ ID NO: 45018 - DNA, 20 bp, Artificial Sequence
  Synthetic
attaccagaaagatgtcctt

SEQ ID NO: 45019 - DNA, 20 bp, Artificial Sequence
  Synthetic
caggcatcagctagttgtga

SEQ ID NO: 45020 - DNA, 20 bp, Artificial Sequence
  Synthetic
gtgatggatctgtcagagtg

SEQ ID NO: 45021 - DNA, 20 bp, Artificial Sequence
  Synthetic
tcaatagcttcttctttaag

SEQ ID NO: 45022 - DNA, 20 bp, Artificial Sequence
  Synthetic
caaagattccatttatagcc

SEQ ID NO: 45023 - DNA, 20 bp, Artificial Sequence
  Synthetic
attcatggccaggctataaa

SEQ ID NO: 45024 - DNA, 20 bp, Artificial Sequence
  Synthetic
tagcctggccatgaatcaac

SEQ ID NO: 45025 - DNA, 20 bp, Artificial Sequence
  Synthetic
agcctggccatgaatcaact

SEQ ID NO: 45026 - DNA, 20 bp, Artificial Sequence
  Synthetic
ttcccagttgattcatggcc

SEQ ID NO: 45027 - DNA, 20 bp, Artificial Sequence
  Synthetic
gattgttcccagttgattca

SEQ ID NO: 45028 - DNA, 20 bp, Artificial Sequence
  Synthetic
ctgggaacaatcattgtatc

SEQ ID NO: 45029 - DNA, 20 bp, Artificial Sequence
  Synthetic
tgggaacaatcattgtatca

SEQ ID NO: 45030 - DNA, 20 bp, Artificial Sequence
  Synthetic
tgtatcagggtccactgaaa

SEQ ID NO: 45031 - DNA, 20 bp, Artificial Sequence
  Synthetic
gctcctccttaccttttcag

SEQ ID NO: 45032 - DNA, 20 bp, Artificial Sequence
  Synthetic
attaaaattcacaggtgtta

SEQ ID NO: 45033 - DNA, 20 bp, Artificial Sequence
  Synthetic
ttaaaattcacaggtgttac

SEQ ID NO: 45034 - DNA, 20 bp, Artificial Sequence
  Synthetic
attcacaggtgttacgggta

SEQ ID NO: 45035 - DNA, 20 bp, Artificial Sequence
  Synthetic
ttcacaggtgttacgggtat

SEQ ID NO: 45036 - DNA, 20 bp, Artificial Sequence
  Synthetic
gattttgcatgtcaacatta

SEQ ID NO: 45037 - DNA, 20 bp, Artificial Sequence
  Synthetic
gtcaacattaaggacacata

SEQ ID NO: 45038 - DNA, 20 bp, Artificial Sequence
  Synthetic
tctattacaggattacgtaa

SEQ ID NO: 45039 - DNA, 20 bp, Artificial Sequence
  Synthetic
aaaggccttagcatatgcca

SEQ ID NO: 45040 - DNA, 20 bp, Artificial Sequence
  Synthetic
tttatccttggcatatgcta

SEQ ID NO: 45041 - DNA, 20 bp, Artificial Sequence
  Synthetic
tgctactagttctttatcct

SEQ ID NO: 45042 - DNA, 20 bp, Artificial Sequence
  Synthetic
aaagaactagtagcatcagc

SEQ ID NO: 45043 - DNA, 20 bp, Artificial Sequence
  Synthetic
aagaactagtagcatcagct

SEQ ID NO: 45044 - DNA, 20 bp, Artificial Sequence
  Synthetic
actagtagcatcagctgggt

SEQ ID NO: 45045 - DNA, 20 bp, Artificial Sequence
  Synthetic
tggacagacaaatattcctt

SEQ ID NO: 45046 - DNA, 20 bp, Artificial Sequence
  Synthetic
ggacagacaaatattccttt

SEQ ID NO: 45047 - DNA, 20 bp, Artificial Sequence
  Synthetic
ttagagtattcacatcccaa

SEQ ID NO: 45048 - DNA, 20 bp, Artificial Sequence
  Synthetic
gcaaaactaatgaagcttaa

SEQ ID NO: 45049 - DNA, 20 bp, Artificial Sequence
  Synthetic
caaaactaatgaagcttaaa

SEQ ID NO: 45050 - DNA, 20 bp, Artificial Sequence
  Synthetic
aatgaagcttaaagggcaca

SEQ ID NO: 45051 - DNA, 20 bp, Artificial Sequence
  Synthetic
agggcacacggataatgtga

SEQ ID NO: 45052 - DNA, 20 bp, Artificial Sequence
  Synthetic
gcattgctattaaacagaga

SEQ ID NO: 45053 - DNA, 20 bp, Artificial Sequence
  Synthetic
ctttgtttgcagtgcctgtc

SEQ ID NO: 45054 - DNA, 20 bp, Artificial Sequence
  Synthetic
tgcctgtcaggcagttctga

SEQ ID NO: 45055 - DNA, 20 bp, Artificial Sequence
  Synthetic
gcctgtcaggcagttctgat

SEQ ID NO: 45056 - DNA, 20 bp, Artificial Sequence
  Synthetic
tcccatcagaactgcctgac

SEQ ID NO: 45057 - DNA, 20 bp, Artificial Sequence
  Synthetic
ctgatgggacaattcgcctt

SEQ ID NO: 45058 - DNA, 20 bp, Artificial Sequence
  Synthetic
acaattcgcctttggtccct

SEQ ID NO: 45059 - DNA, 20 bp, Artificial Sequence
  Synthetic
tctgctggccaagggaccaa

SEQ ID NO: 45060 - DNA, 20 bp, Artificial Sequence
  Synthetic
gcagagcattgactccattt

SEQ ID NO: 45061 - DNA, 20 bp, Artificial Sequence
  Synthetic
tggagtcaatgctctgcagc

SEQ ID NO: 45062 - DNA, 20 bp, Artificial Sequence
  Synthetic
gtgaaaagtctatttagtgc

SEQ ID NO: 45063 - DNA, 20 bp, Artificial Sequence
  Synthetic
ctaaatagacttttcacagc

SEQ ID NO: 45064 - DNA, 20 bp, Artificial Sequence
  Synthetic
tcttatgatagagtctcgac

SEQ ID NO: 45065 - DNA, 20 bp, Artificial Sequence
  Synthetic
gagactctatcataagaata

SEQ ID NO: 45066 - DNA, 20 bp, Artificial Sequence
  Synthetic
agatccatatatagcatcta

SEQ ID NO: 45067 - DNA, 20 bp, Artificial Sequence
  Synthetic
ctatggaacaccatactgat

SEQ ID NO: 45068 - DNA, 20 bp, Artificial Sequence
  Synthetic
tatggaacaccatactgatt

SEQ ID NO: 45069 - DNA, 20 bp, Artificial Sequence
  Synthetic
tgtcgtttacccaatcagta

SEQ ID NO: 45070 - DNA, 20 bp, Artificial Sequence
  Synthetic
gacattgtactctgttgtaa

SEQ ID NO: 45071 - DNA, 20 bp, Artificial Sequence
  Synthetic
acattgtactctgttgtaat

SEQ ID NO: 45072 - DNA, 20 bp, Artificial Sequence
  Synthetic
ctgacacgacagtaaaagta

SEQ ID NO: 45073 - DNA, 20 bp, Artificial Sequence
  Synthetic
acataccgagtccatgatga

SEQ ID NO: 45074 - DNA, 20 bp, Artificial Sequence
  Synthetic
aaacaccttcatcatggact

SEQ ID NO: 45075 - DNA, 20 bp, Artificial Sequence
  Synthetic
gagtccatgatgaaggtgtt

SEQ ID NO: 45076 - DNA, 20 bp, Artificial Sequence
  Synthetic
agtccatgatgaaggtgttt

SEQ ID NO: 45077 - DNA, 20 bp, Artificial Sequence
  Synthetic
gcgcccaaacaccttcatca

SEQ ID NO: 45078 - DNA, 20 bp, Artificial Sequence
  Synthetic
gccttcacacatgtgtattc

SEQ ID NO: 45079 - DNA, 20 bp, Artificial Sequence
  Synthetic
accagaatacacatgtgtga

SEQ ID NO: 45080 - DNA, 20 bp, Artificial Sequence
  Synthetic
ttcacacatgtgtattctgg

SEQ ID NO: 45081 - DNA, 20 bp, Artificial Sequence
  Synthetic
cacatgtgtattctggtgga

SEQ ID NO: 45082 - DNA, 20 bp, Artificial Sequence
  Synthetic
acatgtgtattctggtggaa

SEQ ID NO: 45083 - DNA, 20 bp, Artificial Sequence
  Synthetic
tgtattctggtggaagggac

SEQ ID NO: 45084 - DNA, 20 bp, Artificial Sequence
  Synthetic
ctgggactacagcaagggga

SEQ ID NO: 45085 - DNA, 20 bp, Artificial Sequence
  Synthetic
cagtgcctgaagacgtacac

SEQ ID NO: 45086 - DNA, 20 bp, Artificial Sequence
  Synthetic
tgtggccagtgtacgtcttc

SEQ ID NO: 45087 - DNA, 20 bp, Artificial Sequence
  Synthetic
tgcagtatttctcattcttg

SEQ ID NO: 45088 - DNA, 20 bp, Artificial Sequence
  Synthetic
tttgccaatttctctgttac

SEQ ID NO: 45089 - DNA, 20 bp, Artificial Sequence
  Synthetic
gccaatttctctgttactgg

SEQ ID NO: 45090 - DNA, 20 bp, Artificial Sequence
  Synthetic
cccaccagtaacagagaaat

SEQ ID NO: 45091 - DNA, 20 bp, Artificial Sequence
  Synthetic
ccaatttctctgttactggt

SEQ ID NO: 45092 - DNA, 20 bp, Artificial Sequence
  Synthetic
tttctctgttactggtggga

SEQ ID NO: 45093 - DNA, 20 bp, Artificial Sequence
  Synthetic
gttacgtagtggattgtgtc

SEQ ID NO: 45094 - DNA, 20 bp, Artificial Sequence
  Synthetic
gtggattgtgtctggctcag

SEQ ID NO: 45095 - DNA, 20 bp, Artificial Sequence
  Synthetic
aggataaccttgtttacatc

SEQ ID NO: 45096 - DNA, 20 bp, Artificial Sequence
  Synthetic
gaaggttccagatgtaaaca

SEQ ID NO: 45097 - DNA, 20 bp, Artificial Sequence
  Synthetic
caagtgtctgaaaaccctga

SEQ ID NO: 45098 - DNA, 20 bp, Artificial Sequence
  Synthetic
aagtgtctgaaaaccctgaa

SEQ ID NO: 45099 - DNA, 20 bp, Artificial Sequence
  Synthetic
ataattactgtgtcccttca

SEQ ID NO: 45100 - DNA, 20 bp, Artificial Sequence
  Synthetic
cataattactgtgtcccttc

SEQ ID NO: 45101 - DNA, 20 bp, Artificial Sequence
  Synthetic
gagacaataaggttggactg

SEQ ID NO: 45102 - DNA, 20 bp, Artificial Sequence
  Synthetic
tgagacaataaggttggact

SEQ ID NO: 45103 - DNA, 20 bp, Artificial Sequence
  Synthetic
ctgagacaataaggttggac

SEQ ID NO: 45104 - DNA, 20 bp, Artificial Sequence
  Synthetic
cagtccaaccttattgtctc

SEQ ID NO: 45105 - DNA, 20 bp, Artificial Sequence
  Synthetic
ggatcctgagacaataaggt

SEQ ID NO: 45106 - DNA, 20 bp, Artificial Sequence
  Synthetic
ttacggatcctgagacaata

SEQ ID NO: 45107 - DNA, 20 bp, Artificial Sequence
  Synthetic
ttcagtttgacgaaagcgtg

SEQ ID NO: 45108 - DNA, 20 bp, Artificial Sequence
  Synthetic
ttgacgaaagcgtgaggata

SEQ ID NO: 45109 - DNA, 20 bp, Artificial Sequence
  Synthetic
tgacgaaagcgtgaggatat

SEQ ID NO: 45110 - DNA, 20 bp, Artificial Sequence
  Synthetic
aaatttgagaaaaccatatc

SEQ ID NO: 45111 - DNA, 20 bp, Artificial Sequence
  Synthetic
aaccatatctggtcacaagc

SEQ ID NO: 45112 - DNA, 20 bp, Artificial Sequence
  Synthetic
taccagcttgtgaccagata

SEQ ID NO: 45113 - DNA, 20 bp, Artificial Sequence
  Synthetic
atatctggtcacaagctggt

SEQ ID NO: 45114 - DNA, 20 bp, Artificial Sequence
  Synthetic
agggaatatccgatgtagcc

SEQ ID NO: 45115 - DNA, 20 bp, Artificial Sequence
  Synthetic
atctgacgaccaggctacat

SEQ ID NO: 45116 - DNA, 20 bp, Artificial Sequence
  Synthetic
aaggttagaatctgacgacc

SEQ ID NO: 45117 - DNA, 20 bp, Artificial Sequence
  Synthetic
catctgaggcagaaacaaga

SEQ ID NO: 45118 - DNA, 20 bp, Artificial Sequence
  Synthetic
cttcaaggttttgtcatctg

SEQ ID NO: 45119 - DNA, 20 bp, Artificial Sequence
  Synthetic
atgacaaaaccttgaagata

SEQ ID NO: 45120 - DNA, 20 bp, Artificial Sequence
  Synthetic
tgacaaaaccttgaagatat

SEQ ID NO: 45121 - DNA, 20 bp, Artificial Sequence
  Synthetic
gctcacgtcccatatcttca

SEQ ID NO: 45122 - DNA, 20 bp, Artificial Sequence
  Synthetic
gagattgtacagaaactaca

SEQ ID NO: 45123 - DNA, 20 bp, Artificial Sequence
  Synthetic
cagaaactacaaggccacac

SEQ ID NO: 45124 - DNA, 20 bp, Artificial Sequence
  Synthetic
agcgcaggccctcacctgtg

SEQ ID NO: 45125 - DNA, 20 bp, Artificial Sequence
  Synthetic
aggcgatgatgttttctgtt

SEQ ID NO: 45126 - DNA, 20 bp, Artificial Sequence
  Synthetic
gaggcgatgatgttttctgt

SEQ ID NO: 45127 - DNA, 20 bp, Artificial Sequence
  Synthetic
gtcattttctagcgcagcag

SEQ ID NO: 45128 - DNA, 20 bp, Artificial Sequence
  Synthetic
atgacaaaacaattaaactg

SEQ ID NO: 45129 - DNA, 20 bp, Artificial Sequence
  Synthetic
cgatgagcgtcttcaggcac

SEQ ID NO: 45130 - DNA, 20 bp, Artificial Sequence
  Synthetic
cagtgcctgaagacgctcat

SEQ ID NO: 45131 - DNA, 20 bp, Artificial Sequence
  Synthetic
actcaccgatgagcgtcttc

SEQ ID NO: 45132 - DNA, 20 bp, Artificial Sequence
  Synthetic
acttcacaaaagacacgggg

SEQ ID NO: 45133 - DNA, 20 bp, Artificial Sequence
  Synthetic
aacttcacaaaagacacggg

SEQ ID NO: 45134 - DNA, 20 bp, Artificial Sequence
  Synthetic
gaacttcacaaaagacacgg

SEQ ID NO: 45135 - DNA, 20 bp, Artificial Sequence
  Synthetic
agaacttcacaaaagacacg

SEQ ID NO: 45136 - DNA, 20 bp, Artificial Sequence
  Synthetic
gagaacttcacaaaagacac

SEQ ID NO: 45137 - DNA, 20 bp, Artificial Sequence
  Synthetic
ggagaacttcacaaaagaca

SEQ ID NO: 45138 - DNA, 20 bp, Artificial Sequence
  Synthetic
tttgtgaagttctccccgaa

SEQ ID NO: 45139 - DNA, 20 bp, Artificial Sequence
  Synthetic
caggatgtatttgccgttcg

SEQ ID NO: 45140 - DNA, 20 bp, Artificial Sequence
  Synthetic
ccaggatgtatttgccgttc

SEQ ID NO: 45141 - DNA, 20 bp, Artificial Sequence
  Synthetic
cccgaacggcaaatacatcc

SEQ ID NO: 45142 - DNA, 20 bp, Artificial Sequence
  Synthetic
gccaggatgtatttgccgtt

SEQ ID NO: 45143 - DNA, 20 bp, Artificial Sequence
  Synthetic
atacatcctggccgccacgc

SEQ ID NO: 45144 - DNA, 20 bp, Artificial Sequence
  Synthetic
acttgtccagcgtggcggcc

SEQ ID NO: 45145 - DNA, 20 bp, Artificial Sequence
  Synthetic
tactcacttgtccagcgtgg

SEQ ID NO: 45146 - DNA, 20 bp, Artificial Sequence
  Synthetic
cagtactcacttgtccagcg

SEQ ID NO: 45147 - DNA, 20 bp, Artificial Sequence
  Synthetic
cttgcagcactctgaagctc

SEQ ID NO: 45148 - DNA, 20 bp, Artificial Sequence
  Synthetic
ttgcagcactctgaagctct

SEQ ID NO: 45149 - DNA, 20 bp, Artificial Sequence
  Synthetic
gctctaaagttcacccttgc

SEQ ID NO: 45150 - DNA, 20 bp, Artificial Sequence
  Synthetic
tgctttggtgtggccagcaa

SEQ ID NO: 45151 - DNA, 20 bp, Artificial Sequence
  Synthetic
ctgctttggtgtggccagca

SEQ ID NO: 45152 - DNA, 20 bp, Artificial Sequence
  Synthetic
cggaggacactgctttggtg

SEQ ID NO: 45153 - DNA, 20 bp, Artificial Sequence
  Synthetic
tttcacggaggacactgctt

SEQ ID NO: 45154 - DNA, 20 bp, Artificial Sequence
  Synthetic
attcgggctgaatttcacgg

SEQ ID NO: 45155 - DNA, 20 bp, Artificial Sequence
  Synthetic
tccgtgaaattcagcccgaa

SEQ ID NO: 45156 - DNA, 20 bp, Artificial Sequence
  Synthetic
tccattcgggctgaatttca

SEQ ID NO: 45157 - DNA, 20 bp, Artificial Sequence
  Synthetic
aattcagcccgaatggagag

SEQ ID NO: 45158 - DNA, 20 bp, Artificial Sequence
  Synthetic
cagcccgaatggagagtggc

SEQ ID NO: 45159 - DNA, 20 bp, Artificial Sequence
  Synthetic
ttgccagccactctccattc

SEQ ID NO: 45160 - DNA, 20 bp, Artificial Sequence
  Synthetic
cttgccagccactctccatt

SEQ ID NO: 45161 - DNA, 20 bp, Artificial Sequence
  Synthetic
ctgataaacttattaaaatt

SEQ ID NO: 45162 - DNA, 20 bp, Artificial Sequence
  Synthetic
tgataaacttattaaaattt

SEQ ID NO: 45163 - DNA, 20 bp, Artificial Sequence
  Synthetic
gataaacttattaaaatttg

SEQ ID NO: 45164 - DNA, 20 bp, Artificial Sequence
  Synthetic
agtgagctggcaaagtcttg

SEQ ID NO: 45165 - DNA, 20 bp, Artificial Sequence
  Synthetic
caagactttgccagctcact

SEQ ID NO: 45166 - DNA, 20 bp, Artificial Sequence
  Synthetic
gagactggatccgagtgagc

SEQ ID NO: 45167 - DNA, 20 bp, Artificial Sequence
  Synthetic
agctcactcggatccagtct

SEQ ID NO: 45168 - DNA, 20 bp, Artificial Sequence
  Synthetic
gagggacttacggccgagac

SEQ ID NO: 45169 - DNA, 20 bp, Artificial Sequence
  Synthetic
taggttcattttaatcgtga

SEQ ID NO: 45170 - DNA, 20 bp, Artificial Sequence
  Synthetic
atagctacttgaaactatca

SEQ ID NO: 45171 - DNA, 20 bp, Artificial Sequence
  Synthetic
atagtttcaagtagctatga

SEQ ID NO: 45172 - DNA, 20 bp, Artificial Sequence
  Synthetic
caagtagctatgatggtctc

SEQ ID NO: 45173 - DNA, 20 bp, Artificial Sequence
  Synthetic
ctttgcttcgaagtcgcatc

SEQ ID NO: 45174 - DNA, 20 bp, Artificial Sequence
  Synthetic
tttgcttcgaagtcgcatct

SEQ ID NO: 45175 - DNA, 20 bp, Artificial Sequence
  Synthetic
tagcccatgatgatgccatt

SEQ ID NO: 45176 - DNA, 20 bp, Artificial Sequence
  Synthetic
tgaccaaatggcatcatcat

SEQ ID NO: 45177 - DNA, 20 bp, Artificial Sequence
  Synthetic
ctgaccaaatggcatcatca

SEQ ID NO: 45178 - DNA, 20 bp, Artificial Sequence
  Synthetic
atgccatttggtcagttgct

SEQ ID NO: 45179 - DNA, 20 bp, Artificial Sequence
  Synthetic
tgccatttggtcagttgctt

SEQ ID NO: 45180 - DNA, 20 bp, Artificial Sequence
  Synthetic
gccatttggtcagttgcttg

SEQ ID NO: 45181 - DNA, 20 bp, Artificial Sequence
  Synthetic
cccccaagcaactgaccaaa

SEQ ID NO: 45182 - DNA, 20 bp, Artificial Sequence
  Synthetic
ccatttggtcagttgcttgg

SEQ ID NO: 45183 - DNA, 20 bp, Artificial Sequence
  Synthetic
tgcttgggggacaaacaaga

SEQ ID NO: 45184 - DNA, 20 bp, Artificial Sequence
  Synthetic
gaaggaaaactctgagacag

SEQ ID NO: 45185 - DNA, 20 bp, Artificial Sequence
  Synthetic
aactctgagacagtggtcac

SEQ ID NO: 45186 - DNA, 20 bp, Artificial Sequence
  Synthetic
cacaggctccctagatgacc

SEQ ID NO: 45187 - DNA, 20 bp, Artificial Sequence
  Synthetic
ctccctagatgacctggtga

SEQ ID NO: 45188 - DNA, 20 bp, Artificial Sequence
  Synthetic
gaccttcaccaggtcatcta

SEQ ID NO: 45189 - DNA, 20 bp, Artificial Sequence
  Synthetic
agaccttcaccaggtcatct

SEQ ID NO: 45190 - DNA, 20 bp, Artificial Sequence
  Synthetic
tagatgacctggtgaaggtc

SEQ ID NO: 45191 - DNA, 20 bp, Artificial Sequence
  Synthetic
acctggtgaaggtctggaaa

SEQ ID NO: 45192 - DNA, 20 bp, Artificial Sequence
  Synthetic
accatttccagaccttcacc

SEQ ID NO: 45193 - DNA, 20 bp, Artificial Sequence
  Synthetic
tggaaaacttctgcataccc

SEQ ID NO: 45194 - DNA, 20 bp, Artificial Sequence
  Synthetic
aaacttctgcataccctgga

SEQ ID NO: 45195 - DNA, 20 bp, Artificial Sequence
  Synthetic
atgatgatatataccttcca

SEQ ID NO: 45196 - DNA, 20 bp, Artificial Sequence
  Synthetic
gatgatgatatataccttcc

SEQ ID NO: 45197 - DNA, 20 bp, Artificial Sequence
  Synthetic
aggagcgaatgggcatggca

SEQ ID NO: 45198 - DNA, 20 bp, Artificial Sequence
  Synthetic
ggtcaaggagcgaatgggca

SEQ ID NO: 45199 - DNA, 20 bp, Artificial Sequence
  Synthetic
gaaaaggtcaaggagcgaat

SEQ ID NO: 45200 - DNA, 20 bp, Artificial Sequence
  Synthetic
ggaaaaggtcaaggagcgaa

SEQ ID NO: 45201 - DNA, 20 bp, Artificial Sequence
  Synthetic
tcgctccttgaccttttccc

SEQ ID NO: 45202 - DNA, 20 bp, Artificial Sequence
  Synthetic
ggagtccggggaaaaggtca

SEQ ID NO: 45203 - DNA, 20 bp, Artificial Sequence
  Synthetic
gagctgggagtccggggaaa

SEQ ID NO: 45204 - DNA, 20 bp, Artificial Sequence
  Synthetic
gacaaggagctgggagtccg

SEQ ID NO: 45205 - DNA, 20 bp, Artificial Sequence
  Synthetic
tgacaaggagctgggagtcc

SEQ ID NO: 45206 - DNA, 20 bp, Artificial Sequence
  Synthetic
gtgacaaggagctgggagtc

SEQ ID NO: 45207 - DNA, 20 bp, Artificial Sequence
  Synthetic
tgaagcagtgacaaggagct

SEQ ID NO: 45208 - DNA, 20 bp, Artificial Sequence
  Synthetic
ctgaagcagtgacaaggagc

SEQ ID NO: 45209 - DNA, 20 bp, Artificial Sequence
  Synthetic
catcatctgaagcagtgaca

SEQ ID NO: 45210 - DNA, 20 bp, Artificial Sequence
  Synthetic
cttgtcactgcttcagatga

SEQ ID NO: 45211 - DNA, 20 bp, Artificial Sequence
  Synthetic
tgggaaaaaggaatattctt

SEQ ID NO: 45212 - DNA, 20 bp, Artificial Sequence
  Synthetic
gaatattctttggacacgag

SEQ ID NO: 45213 - DNA, 20 bp, Artificial Sequence
  Synthetic
ttctctgaacagagtcctga

SEQ ID NO: 45214 - DNA, 20 bp, Artificial Sequence
  Synthetic
tctctgaacagagtcctgat

SEQ ID NO: 45215 - DNA, 20 bp, Artificial Sequence
  Synthetic
ctggctaggtatttcccatc

SEQ ID NO: 45216 - DNA, 20 bp, Artificial Sequence
  Synthetic
gatgggaaatacctagccag

SEQ ID NO: 45217 - DNA, 20 bp, Artificial Sequence
  Synthetic
catctatggctccactggct

SEQ ID NO: 45218 - DNA, 20 bp, Artificial Sequence
  Synthetic
ctagccagtggagccataga

SEQ ID NO: 45219 - DNA, 20 bp, Artificial Sequence
  Synthetic
gattccatctatggctccac

SEQ ID NO: 45220 - DNA, 20 bp, Artificial Sequence
  Synthetic
aatattgatgattccatcta

SEQ ID NO: 45221 - DNA, 20 bp, Artificial Sequence
  Synthetic
aatttggctggcacgctgag

SEQ ID NO: 45222 - DNA, 20 bp, Artificial Sequence
  Synthetic
cgctgagcggccatgcctcc

SEQ ID NO: 45223 - DNA, 20 bp, Artificial Sequence
  Synthetic
gctgagcggccatgcctcct

SEQ ID NO: 45224 - DNA, 20 bp, Artificial Sequence
  Synthetic
cgttcagcacccaggaggca

SEQ ID NO: 45225 - DNA, 20 bp, Artificial Sequence
  Synthetic
tgcaacgttcagcacccagg

SEQ ID NO: 45226 - DNA, 20 bp, Artificial Sequence
  Synthetic
gaatgcaacgttcagcaccc

SEQ ID NO: 45227 - DNA, 20 bp, Artificial Sequence
  Synthetic
gaaacaaagtgagtgtcatc

SEQ ID NO: 45228 - DNA, 20 bp, Artificial Sequence
  Synthetic
atgacactcactttgtttcc

SEQ ID NO: 45229 - DNA, 20 bp, Artificial Sequence
  Synthetic
ctgacaaaagtgtaaaagtt

SEQ ID NO: 45230 - DNA, 20 bp, Artificial Sequence
  Synthetic
tgacaaaagtgtaaaagttt

SEQ ID NO: 45231 - DNA, 20 bp, Artificial Sequence
  Synthetic
agtgtaaaagtttgggatgt

SEQ ID NO: 45232 - DNA, 20 bp, Artificial Sequence
  Synthetic
tcacaccttctttgatcacc

SEQ ID NO: 45233 - DNA, 20 bp, Artificial Sequence
  Synthetic
ctgatcctggtgatcaaaga

SEQ ID NO: 45234 - DNA, 20 bp, Artificial Sequence
  Synthetic
cttctttgatcaccaggatc

SEQ ID NO: 45235 - DNA, 20 bp, Artificial Sequence
  Synthetic
aataatgccatacctgatcc

SEQ ID NO: 45236 - DNA, 20 bp, Artificial Sequence
  Synthetic
ttttttaaatttacaggtct

SEQ ID NO: 45237 - DNA, 20 bp, Artificial Sequence
  Synthetic
tttttaaatttacaggtctg

SEQ ID NO: 45238 - DNA, 20 bp, Artificial Sequence
  Synthetic
gtctggggagtaaaatacaa

SEQ ID NO: 45239 - DNA, 20 bp, Artificial Sequence
  Synthetic
ggagtaaaatacaatggaaa

SEQ ID NO: 45240 - DNA, 20 bp, Artificial Sequence
  Synthetic
ggttcaaaaattgtgtctgt

SEQ ID NO: 45241 - DNA, 20 bp, Artificial Sequence
  Synthetic
tgtgtctgttggagatgacc

SEQ ID NO: 45242 - DNA, 20 bp, Artificial Sequence
  Synthetic
aatcatagatgtgaatttcc

SEQ ID NO: 45243 - DNA, 20 bp, Artificial Sequence
  Synthetic
gctggacctacagtggagtc

SEQ ID NO: 45244 - DNA, 20 bp, Artificial Sequence
  Synthetic
ggacctacagtggagtctgg

SEQ ID NO: 45245 - DNA, 20 bp, Artificial Sequence
  Synthetic
gacctacagtggagtctgga

SEQ ID NO: 45246 - DNA, 20 bp, Artificial Sequence
  Synthetic
gagtctggagggacatcagc

SEQ ID NO: 45247 - DNA, 20 bp, Artificial Sequence
  Synthetic
agtctggagggacatcagct

SEQ ID NO: 45248 - DNA, 20 bp, Artificial Sequence
  Synthetic
ggagggacatcagctgggag

SEQ ID NO: 45249 - DNA, 20 bp, Artificial Sequence
  Synthetic
tcagctgggagtggtgtctg

SEQ ID NO: 45250 - DNA, 20 bp, Artificial Sequence
  Synthetic
atgcagcaatgggcagggtg

SEQ ID NO: 45251 - DNA, 20 bp, Artificial Sequence
  Synthetic
gctggatgcagcaatgggca

SEQ ID NO: 45252 - DNA, 20 bp, Artificial Sequence
  Synthetic
agctggatgcagcaatgggc

SEQ ID NO: 45253 - DNA, 20 bp, Artificial Sequence
  Synthetic
agagagctggatgcagcaat

SEQ ID NO: 45254 - DNA, 20 bp, Artificial Sequence
  Synthetic
aagagagctggatgcagcaa

SEQ ID NO: 45255 - DNA, 20 bp, Artificial Sequence
  Synthetic
aatatgagcatcaagagagc

SEQ ID NO: 45256 - DNA, 20 bp, Artificial Sequence
  Synthetic
ttgatgctcatattcgtctt

SEQ ID NO: 45257 - DNA, 20 bp, Artificial Sequence
  Synthetic
tgatgctcatattcgtcttt

SEQ ID NO: 45258 - DNA, 20 bp, Artificial Sequence
  Synthetic
tcatattcgtctttgggact

SEQ ID NO: 45259 - DNA, 20 bp, Artificial Sequence
  Synthetic
gggagtgtacagctgagctc

SEQ ID NO: 45260 - DNA, 20 bp, Artificial Sequence
  Synthetic
gtacactcccagtgtgtcac

SEQ ID NO: 45261 - DNA, 20 bp, Artificial Sequence
  Synthetic
tacactcccagtgtgtcact

SEQ ID NO: 45262 - DNA, 20 bp, Artificial Sequence
  Synthetic
ctcccagtgtgtcactgggc

SEQ ID NO: 45263 - DNA, 20 bp, Artificial Sequence
  Synthetic
caccagcccagtgacacact

SEQ ID NO: 45264 - DNA, 20 bp, Artificial Sequence
  Synthetic
acaccagcccagtgacacac

SEQ ID NO: 45265 - DNA, 20 bp, Artificial Sequence
  Synthetic
ggctggtgttctccccacac

SEQ ID NO: 45266 - DNA, 20 bp, Artificial Sequence
  Synthetic
caaagaacagtacctgtgtg

SEQ ID NO: 45267 - DNA, 20 bp, Artificial Sequence
  Synthetic
acaaagaacagtacctgtgt

SEQ ID NO: 45268 - DNA, 20 bp, Artificial Sequence
  Synthetic
gacaaagaacagtacctgtg

SEQ ID NO: 45269 - DNA, 20 bp, Artificial Sequence
  Synthetic
atctgatagtgttcccttcc

SEQ ID NO: 45270 - DNA, 20 bp, Artificial Sequence
  Synthetic
tcactgagagaggccaggaa

SEQ ID NO: 45271 - DNA, 20 bp, Artificial Sequence
  Synthetic
ttcactgagagaggccagga

SEQ ID NO: 45272 - DNA, 20 bp, Artificial Sequence
  Synthetic
agtcttcactgagagaggcc

SEQ ID NO: 45273 - DNA, 20 bp, Artificial Sequence
  Synthetic
tgagcagtcttcactgagag

SEQ ID NO: 45274 - DNA, 20 bp, Artificial Sequence
  Synthetic
acagtcagtgtcttgagctc

SEQ ID NO: 45275 - DNA, 20 bp, Artificial Sequence
  Synthetic
tctggcacacaagctgtcag

SEQ ID NO: 45276 - DNA, 20 bp, Artificial Sequence
  Synthetic
tcagtggtagcaaagacatc

SEQ ID NO: 45277 - DNA, 20 bp, Artificial Sequence
  Synthetic
gtggtagcaaagacatctgg

SEQ ID NO: 45278 - DNA, 20 bp, Artificial Sequence
  Synthetic
tggtagcaaagacatctggt

SEQ ID NO: 45279 - DNA, 20 bp, Artificial Sequence
  Synthetic
gcttttgcttcttagcatca

SEQ ID NO: 45280 - DNA, 20 bp, Artificial Sequence
  Synthetic
tgcttcttagcatcaaggtt

SEQ ID NO: 45281 - DNA, 20 bp, Artificial Sequence
  Synthetic
gcttcttagcatcaaggttt

SEQ ID NO: 45282 - DNA, 20 bp, Artificial Sequence
  Synthetic
gtggtactgagttcataccg

SEQ ID NO: 45283 - DNA, 20 bp, Artificial Sequence
  Synthetic
ctttatagctcatgctgctc

SEQ ID NO: 45284 - DNA, 20 bp, Artificial Sequence
  Synthetic
tgttgctgcctctcctcaca

SEQ ID NO: 45285 - DNA, 20 bp, Artificial Sequence
  Synthetic
cacagagtccttgtgaggag

SEQ ID NO: 45286 - DNA, 20 bp, Artificial Sequence
  Synthetic
agaaacacagagtccttgtg

SEQ ID NO: 45287 - DNA, 20 bp, Artificial Sequence
  Synthetic
tgtgtttctttcatgcagcg

SEQ ID NO: 45288 - DNA, 20 bp, Artificial Sequence
  Synthetic
aggacaatagaattttactc

SEQ ID NO: 45289 - DNA, 20 bp, Artificial Sequence
  Synthetic
ggacaatagaattttactct

SEQ ID NO: 45290 - DNA, 20 bp, Artificial Sequence
  Synthetic
atcataataaactgagagtc

SEQ ID NO: 45291 - DNA, 20 bp, Artificial Sequence
  Synthetic
gactctcagtttattatgat

SEQ ID NO: 45292 - DNA, 20 bp, Artificial Sequence
  Synthetic
aatatcctctttaggttcag

SEQ ID NO: 45293 - DNA, 20 bp, Artificial Sequence
  Synthetic
tcctctttaggttcagagga

SEQ ID NO: 45294 - DNA, 20 bp, Artificial Sequence
  Synthetic
aggatggcaagatccatgtc

SEQ ID NO: 45295 - DNA, 20 bp, Artificial Sequence
  Synthetic
ggcaagatccatgtctggaa

SEQ ID NO: 45296 - DNA, 20 bp, Artificial Sequence
  Synthetic
cgctctctccattccagaca

SEQ ID NO: 45297 - DNA, 20 bp, Artificial Sequence
  Synthetic
taaggtgttccgcgaaaact

SEQ ID NO: 45298 - DNA, 20 bp, Artificial Sequence
  Synthetic
taatcttgtccgagttttcg

SEQ ID NO: 45299 - DNA, 20 bp, Artificial Sequence
  Synthetic
tgcttcgatttcagccccaa

SEQ ID NO: 45300 - DNA, 20 bp, Artificial Sequence
  Synthetic
tttcagccccaacggcgaga

SEQ ID NO: 45301 - DNA, 20 bp, Artificial Sequence
  Synthetic
agatgaccgtctcgccgttg

SEQ ID NO: 45302 - DNA, 20 bp, Artificial Sequence
  Synthetic
gagatgaccgtctcgccgtt

SEQ ID NO: 45303 - DNA, 20 bp, Artificial Sequence
  Synthetic
cgagatgaccgtctcgccgt

SEQ ID NO: 45304 - DNA, 20 bp, Artificial Sequence
  Synthetic
ctggcagtcatagagcacga

SEQ ID NO: 45305 - DNA, 20 bp, Artificial Sequence
  Synthetic
gtgttggatggtaaacacac

SEQ ID NO: 45306 - DNA, 20 bp, Artificial Sequence
  Synthetic
tgaattgcaaacaggtaatc

SEQ ID NO: 45307 - DNA, 20 bp, Artificial Sequence
  Synthetic
ttgaattgcaaacaggtaat

SEQ ID NO: 45308 - DNA, 20 bp, Artificial Sequence
  Synthetic
cttggggttgaattgcaaac

SEQ ID NO: 45309 - DNA, 20 bp, Artificial Sequence
  Synthetic
tggcaaaagtcatgaacttg

SEQ ID NO: 45310 - DNA, 20 bp, Artificial Sequence
  Synthetic
ctggcaaaagtcatgaactt

SEQ ID NO: 45311 - DNA, 20 bp, Artificial Sequence
  Synthetic
actggcaaaagtcatgaact

SEQ ID NO: 45312 - DNA, 20 bp, Artificial Sequence
  Synthetic
taccatgttggaacacgcac

SEQ ID NO: 45313 - DNA, 20 bp, Artificial Sequence
  Synthetic
aaatacatcagatactttcc

SEQ ID NO: 45314 - DNA, 20 bp, Artificial Sequence
  Synthetic
actttcctggacatagcaaa

SEQ ID NO: 45315 - DNA, 20 bp, Artificial Sequence
  Synthetic
tcttaccttttgctatgtcc

SEQ ID NO: 45316 - DNA, 20 bp, Artificial Sequence
  Synthetic
ctcgatgtattgcagggtgg

SEQ ID NO: 45317 - DNA, 20 bp, Artificial Sequence
  Synthetic
ggccttgtccatgtcacctg

SEQ ID NO: 45318 - DNA, 20 bp, Artificial Sequence
  Synthetic
atccacaggtgacatggaca

SEQ ID NO: 45319 - DNA, 20 bp, Artificial Sequence
  Synthetic
agtgtcatccacaggtgaca

SEQ ID NO: 45320 - DNA, 20 bp, Artificial Sequence
  Synthetic
gaaatgaaagtgtcatccac

SEQ ID NO: 45321 - DNA, 20 bp, Artificial Sequence
  Synthetic
gtggatgacactttcatttc

SEQ ID NO: 45322 - DNA, 20 bp, Artificial Sequence
  Synthetic
tggatgacactttcatttct

SEQ ID NO: 45323 - DNA, 20 bp, Artificial Sequence
  Synthetic
ttgataagaccattcgactc

SEQ ID NO: 45324 - DNA, 20 bp, Artificial Sequence
  Synthetic
tgataagaccattcgactct

SEQ ID NO: 45325 - DNA, 20 bp, Artificial Sequence
  Synthetic
ccggagatcccagagtcgaa

SEQ ID NO: 45326 - DNA, 20 bp, Artificial Sequence
  Synthetic
caaacttgaaatgggctggg

SEQ ID NO: 45327 - DNA, 20 bp, Artificial Sequence
  Synthetic
cacccagcccatttcaagtt

SEQ ID NO: 45328 - DNA, 20 bp, Artificial Sequence
  Synthetic
atccaaacttgaaatgggct

SEQ ID NO: 45329 - DNA, 20 bp, Artificial Sequence
  Synthetic
aatccaaacttgaaatgggc

SEQ ID NO: 45330 - DNA, 20 bp, Artificial Sequence
  Synthetic
agcccatttcaagtttggat

SEQ ID NO: 45331 - DNA, 20 bp, Artificial Sequence
  Synthetic
ctccaatccaaacttgaaat

SEQ ID NO: 45332 - DNA, 20 bp, Artificial Sequence
  Synthetic
actccaatccaaacttgaaa

SEQ ID NO: 45333 - DNA, 20 bp, Artificial Sequence
  Synthetic
tggattggagtccagataaa

SEQ ID NO: 45334 - DNA, 20 bp, Artificial Sequence
  Synthetic
ggattggagtccagataaaa

SEQ ID NO: 45335 - DNA, 20 bp, Artificial Sequence
  Synthetic
gattggagtccagataaaag

SEQ ID NO: 45336 - DNA, 20 bp, Artificial Sequence
  Synthetic
acgcagagaccccttttatc

SEQ ID NO: 45337 - DNA, 20 bp, Artificial Sequence
  Synthetic
ctgtagttcatttgaccaaa

SEQ ID NO: 45338 - DNA, 20 bp, Artificial Sequence
  Synthetic
cgatcagtactctcaccgtt

SEQ ID NO: 45339 - DNA, 20 bp, Artificial Sequence
  Synthetic
gatgccagtatattctgtaa

SEQ ID NO: 45340 - DNA, 20 bp, Artificial Sequence
  Synthetic
atgccagtatattctgtaaa

SEQ ID NO: 45341 - DNA, 20 bp, Artificial Sequence
  Synthetic
tggccctttacagaatatac

SEQ ID NO: 45342 - DNA, 20 bp, Artificial Sequence
  Synthetic
tggcatttataatttcttta

SEQ ID NO: 45343 - DNA, 20 bp, Artificial Sequence
  Synthetic
gaaattataaatgccataga

SEQ ID NO: 45344 - DNA, 20 bp, Artificial Sequence
  Synthetic
ataaatgccatagatggcat

SEQ ID NO: 45345 - DNA, 20 bp, Artificial Sequence
  Synthetic
aatgccatagatggcatagg

SEQ ID NO: 45346 - DNA, 20 bp, Artificial Sequence
  Synthetic
tagtccacctatgccatcta

SEQ ID NO: 45347 - DNA, 20 bp, Artificial Sequence
  Synthetic
atagatggcataggtggact

SEQ ID NO: 45348 - DNA, 20 bp, Artificial Sequence
  Synthetic
ggcataggtggactaggaat

SEQ ID NO: 45349 - DNA, 20 bp, Artificial Sequence
  Synthetic
ggtggactaggaattggaga

SEQ ID NO: 45350 - DNA, 20 bp, Artificial Sequence
  Synthetic
ggagcacctgaaattgtgac

SEQ ID NO: 45351 - DNA, 20 bp, Artificial Sequence
  Synthetic
cggctgccagtcacaatttc

SEQ ID NO: 45352 - DNA, 20 bp, Artificial Sequence
  Synthetic
attgtgactggcagccgaga

SEQ ID NO: 45353 - DNA, 20 bp, Artificial Sequence
  Synthetic
aatacagggactcaccatct

SEQ ID NO: 45354 - DNA, 20 bp, Artificial Sequence
  Synthetic
atgcatggcaggaactgtga

SEQ ID NO: 45355 - DNA, 20 bp, Artificial Sequence
  Synthetic
tggcaggaactgtgaaggtg

SEQ ID NO: 45356 - DNA, 20 bp, Artificial Sequence
  Synthetic
ggcaggaactgtgaaggtgt

SEQ ID NO: 45357 - DNA, 20 bp, Artificial Sequence
  Synthetic
tcaagacagatggcaaaggg

SEQ ID NO: 45358 - DNA, 20 bp, Artificial Sequence
  Synthetic
caagacagatggcaaagggt

SEQ ID NO: 45359 - DNA, 20 bp, Artificial Sequence
  Synthetic
aagacagatggcaaagggtg

SEQ ID NO: 45360 - DNA, 20 bp, Artificial Sequence
  Synthetic
agatggcaaagggtggggcc

SEQ ID NO: 45361 - DNA, 20 bp, Artificial Sequence
  Synthetic
ggtggggcctggtcgccaag

SEQ ID NO: 45362 - DNA, 20 bp, Artificial Sequence
  Synthetic
gtggggcctggtcgccaaga

SEQ ID NO: 45363 - DNA, 20 bp, Artificial Sequence
  Synthetic
tgatgtccctcttggcgacc

SEQ ID NO: 45364 - DNA, 20 bp, Artificial Sequence
  Synthetic
cgccaagagggacatcagaa

SEQ ID NO: 45365 - DNA, 20 bp, Artificial Sequence
  Synthetic
tacctttctgatgtccctct

SEQ ID NO: 45366 - DNA, 20 bp, Artificial Sequence
  Synthetic
actcgttaacaaattctccc

SEQ ID NO: 45367 - DNA, 20 bp, Artificial Sequence
  Synthetic
gaatttgttaacgagtacgt

SEQ ID NO: 45368 - DNA, 20 bp, Artificial Sequence
  Synthetic
aatttgttaacgagtacgtt

SEQ ID NO: 45369 - DNA, 20 bp, Artificial Sequence
  Synthetic
atttgttaacgagtacgttg

SEQ ID NO: 45370 - DNA, 20 bp, Artificial Sequence
  Synthetic
cgttggggagctgatcgacg

SEQ ID NO: 45371 - DNA, 20 bp, Artificial Sequence
  Synthetic
tggggagctgatcgacgagg

SEQ ID NO: 45372 - DNA, 20 bp, Artificial Sequence
  Synthetic
gatcgacgaggaggagtgca

SEQ ID NO: 45373 - DNA, 20 bp, Artificial Sequence
  Synthetic
tatagtgagcatgtagaagt

SEQ ID NO: 45374 - DNA, 20 bp, Artificial Sequence
  Synthetic
ctatagtgagcatgtagaag

SEQ ID NO: 45375 - DNA, 20 bp, Artificial Sequence
  Synthetic
ctacatgctcactatagaca

SEQ ID NO: 45376 - DNA, 20 bp, Artificial Sequence
  Synthetic
caggaccgtataatagacgc

SEQ ID NO: 45377 - DNA, 20 bp, Artificial Sequence
  Synthetic
tggggccagcgtctattata

SEQ ID NO: 45378 - DNA, 20 bp, Artificial Sequence
  Synthetic
ataatagacgctggccccaa

SEQ ID NO: 45379 - DNA, 20 bp, Artificial Sequence
  Synthetic
atcgagagtagtttcctttg

SEQ ID NO: 45380 - DNA, 20 bp, Artificial Sequence
  Synthetic
aatcgagagtagtttccttt

SEQ ID NO: 45381 - DNA, 20 bp, Artificial Sequence
  Synthetic
aaatcgagagtagtttcctt

SEQ ID NO: 45382 - DNA, 20 bp, Artificial Sequence
  Synthetic
tgagggtctcacagttgggc

SEQ ID NO: 45383 - DNA, 20 bp, Artificial Sequence
  Synthetic
cacttgagggtctcacagtt

SEQ ID NO: 45384 - DNA, 20 bp, Artificial Sequence
  Synthetic
ccacttgagggtctcacagt

SEQ ID NO: 45385 - DNA, 20 bp, Artificial Sequence
  Synthetic
ccaactgtgagaccctcaag

SEQ ID NO: 45386 - DNA, 20 bp, Artificial Sequence
  Synthetic
accctcaagtggacagtgaa

SEQ ID NO: 45387 - DNA, 20 bp, Artificial Sequence
  Synthetic
cccattcactgtccacttga

SEQ ID NO: 45388 - DNA, 20 bp, Artificial Sequence
  Synthetic
ccctcaagtggacagtgaat

SEQ ID NO: 45389 - DNA, 20 bp, Artificial Sequence
  Synthetic
ccccattcactgtccacttg

SEQ ID NO: 45390 - DNA, 20 bp, Artificial Sequence
  Synthetic
cctcaagtggacagtgaatg

SEQ ID NO: 45391 - DNA, 20 bp, Artificial Sequence
  Synthetic
agtgaatggggacactcgtg

SEQ ID NO: 45392 - DNA, 20 bp, Artificial Sequence
  Synthetic
gtgaatggggacactcgtgt

SEQ ID NO: 45393 - DNA, 20 bp, Artificial Sequence
  Synthetic
gaatgtcacagacggcaaac

SEQ ID NO: 45394 - DNA, 20 bp, Artificial Sequence
  Synthetic
gccgtctgtgacattcctgc

SEQ ID NO: 45395 - DNA, 20 bp, Artificial Sequence
  Synthetic
acctgcaggaatgtcacaga

SEQ ID NO: 45396 - DNA, 20 bp, Artificial Sequence
  Synthetic
tccccagagcttgtacctgc

SEQ ID NO: 45397 - DNA, 20 bp, Artificial Sequence
  Synthetic
ttaaaagtcagctccgtccc

SEQ ID NO: 45398 - DNA, 20 bp, Artificial Sequence
  Synthetic
tggtgcttcgtgtgctccaa

SEQ ID NO: 45399 - DNA, 20 bp, Artificial Sequence
  Synthetic
acccccaggcccctcacctt

SEQ ID NO: 45400 - DNA, 20 bp, Artificial Sequence
  Synthetic
ggcaggactcacagcacaga

SEQ ID NO: 45401 - DNA, 20 bp, Artificial Sequence
  Synthetic
gtgctgtgagtcctgcccag

SEQ ID NO: 45402 - DNA, 20 bp, Artificial Sequence
  Synthetic
agggtggaaggccgctgggc

SEQ ID NO: 45403 - DNA, 20 bp, Artificial Sequence
  Synthetic
agtcagggtggaaggccgct

SEQ ID NO: 45404 - DNA, 20 bp, Artificial Sequence
  Synthetic
cagtcagggtggaaggccgc

SEQ ID NO: 45405 - DNA, 20 bp, Artificial Sequence
  Synthetic
gttcaggcagtcagggtgga

SEQ ID NO: 45406 - DNA, 20 bp, Artificial Sequence
  Synthetic
cgatgttcaggcagtcaggg

SEQ ID NO: 45407 - DNA, 20 bp, Artificial Sequence
  Synthetic
tctcgatgttcaggcagtca

SEQ ID NO: 45408 - DNA, 20 bp, Artificial Sequence
  Synthetic
atctcgatgttcaggcagtc

SEQ ID NO: 45409 - DNA, 20 bp, Artificial Sequence
  Synthetic
cgtcaggcatctcgatgttc

SEQ ID NO: 45410 - DNA, 20 bp, Artificial Sequence
  Synthetic
ctgaacatcgagatgcctga

SEQ ID NO: 45411 - DNA, 20 bp, Artificial Sequence
  Synthetic
tcgagatgcctgacggcagc

SEQ ID NO: 45412 - DNA, 20 bp, Artificial Sequence
  Synthetic
ttgcagaaccagctgccgtc

SEQ ID NO: 45413 - DNA, 20 bp, Artificial Sequence
  Synthetic
gctggttctgcaatgactgc

SEQ ID NO: 45414 - DNA, 20 bp, Artificial Sequence
  Synthetic
ctggttctgcaatgactgca

SEQ ID NO: 45415 - DNA, 20 bp, Artificial Sequence
  Synthetic
ttctgcaatgactgcagggc

SEQ ID NO: 45416 - DNA, 20 bp, Artificial Sequence
  Synthetic
tctgcaatgactgcagggct

SEQ ID NO: 45417 - DNA, 20 bp, Artificial Sequence
  Synthetic
tcaaaacggagcggagaggc

SEQ ID NO: 45418 - DNA, 20 bp, Artificial Sequence
  Synthetic
caaaacggagcggagaggct

SEQ ID NO: 45419 - DNA, 20 bp, Artificial Sequence
  Synthetic
aaaacggagcggagaggctg

SEQ ID NO: 45420 - DNA, 20 bp, Artificial Sequence
  Synthetic
agcggagaggctggggcctc

SEQ ID NO: 45421 - DNA, 20 bp, Artificial Sequence
  Synthetic
gctggggcctcaggaccaaa

SEQ ID NO: 45422 - DNA, 20 bp, Artificial Sequence
  Synthetic
taatgctccttttggtcctg

SEQ ID NO: 45423 - DNA, 20 bp, Artificial Sequence
  Synthetic
gaccaaaaggagcattaaga

SEQ ID NO: 45424 - DNA, 20 bp, Artificial Sequence
  Synthetic
taccttcttaatgctccttt

SEQ ID NO: 45425 - DNA, 20 bp, Artificial Sequence
  Synthetic
attcatttacaaattcaccc

SEQ ID NO: 45426 - DNA, 20 bp, Artificial Sequence
  Synthetic
gaatttgtaaatgaatacgt

SEQ ID NO: 45427 - DNA, 20 bp, Artificial Sequence
  Synthetic
attagttacactgttctcgt

SEQ ID NO: 45428 - DNA, 20 bp, Artificial Sequence
  Synthetic
aattagttacactgttctcg

SEQ ID NO: 45429 - DNA, 20 bp, Artificial Sequence
  Synthetic
ttatatgttaactgttacca

SEQ ID NO: 45430 - DNA, 20 bp, Artificial Sequence
  Synthetic
aaggaccgtataattgatgc

SEQ ID NO: 45431 - DNA, 20 bp, Artificial Sequence
  Synthetic
ttgggccggcatcaattata

SEQ ID NO: 45432 - DNA, 20 bp, Artificial Sequence
  Synthetic
ataattgatgccggcccaaa

SEQ ID NO: 45433 - DNA, 20 bp, Artificial Sequence
  Synthetic
agaataatttccttttgggc

SEQ ID NO: 45434 - DNA, 20 bp, Artificial Sequence
  Synthetic
agcgagaataatttcctttt

SEQ ID NO: 45435 - DNA, 20 bp, Artificial Sequence
  Synthetic
aagcgagaataatttccttt

SEQ ID NO: 45436 - DNA, 20 bp, Artificial Sequence
  Synthetic
cacagttgggattacaactg

SEQ ID NO: 45437 - DNA, 20 bp, Artificial Sequence
  Synthetic
cacttttgtgtttcacagtt

SEQ ID NO: 45438 - DNA, 20 bp, Artificial Sequence
  Synthetic
ccacttttgtgtttcacagt

SEQ ID NO: 45439 - DNA, 20 bp, Artificial Sequence
  Synthetic
ccaactgtgaaacacaaaag

SEQ ID NO: 45440 - DNA, 20 bp, Artificial Sequence
  Synthetic
acacaaaagtggacagtgaa

SEQ ID NO: 45441 - DNA, 20 bp, Artificial Sequence
  Synthetic
agtgaatggagatgttcgag

SEQ ID NO: 45442 - DNA, 20 bp, Artificial Sequence
  Synthetic
gtgaatggagatgttcgagt

SEQ ID NO: 45443 - DNA, 20 bp, Artificial Sequence
  Synthetic
gctctctgtgatattcctgc

SEQ ID NO: 45444 - DNA, 20 bp, Artificial Sequence
  Synthetic
cgagtcacttttttacctgc

SEQ ID NO: 45445 - DNA, 20 bp, Artificial Sequence
  Synthetic
acaataaacacccgatgtac

SEQ ID NO: 45446 - DNA, 20 bp, Artificial Sequence
  Synthetic
ataaacacccgatgtacagg

SEQ ID NO: 45447 - DNA, 20 bp, Artificial Sequence
  Synthetic
acacccgatgtacaggaggc

SEQ ID NO: 45448 - DNA, 20 bp, Artificial Sequence
  Synthetic
gcaccagcctcctgtacatc

SEQ ID NO: 45449 - DNA, 20 bp, Artificial Sequence
  Synthetic
tgcaccagcctcctgtacat

SEQ ID NO: 45450 - DNA, 20 bp, Artificial Sequence
  Synthetic
gaggctggtgcactcagctg

SEQ ID NO: 45451 - DNA, 20 bp, Artificial Sequence
  Synthetic
ggacgttcccaccattcaag

SEQ ID NO: 45452 - DNA, 20 bp, Artificial Sequence
  Synthetic
gactttacctcttgaatggt

SEQ ID NO: 45453 - DNA, 20 bp, Artificial Sequence
  Synthetic
cgactttacctcttgaatgg

SEQ ID NO: 45454 - DNA, 20 bp, Artificial Sequence
  Synthetic
aaccgactttacctcttgaa

SEQ ID NO: 45455 - DNA, 20 bp, Artificial Sequence
  Synthetic
cctctgcagaaagtgaatga

SEQ ID NO: 45456 - DNA, 20 bp, Artificial Sequence
  Synthetic
ctctgcagaaagtgaatgaa

SEQ ID NO: 45457 - DNA, 20 bp, Artificial Sequence
  Synthetic
ctttgaactcttcataactt

SEQ ID NO: 45458 - DNA, 20 bp, Artificial Sequence
  Synthetic
ggtattgtggagaagcaatt

SEQ ID NO: 45459 - DNA, 20 bp, Artificial Sequence
  Synthetic
cggtattgtggagaagcaat

SEQ ID NO: 45460 - DNA, 20 bp, Artificial Sequence
  Synthetic
catagaaaatcacggtattg

SEQ ID NO: 45461 - DNA, 20 bp, Artificial Sequence
  Synthetic
cacaataccgtgattttcta

SEQ ID NO: 45462 - DNA, 20 bp, Artificial Sequence
  Synthetic
aataccgtgattttctatgg

SEQ ID NO: 45463 - DNA, 20 bp, Artificial Sequence
  Synthetic
tcaacctccatagaaaatca

SEQ ID NO: 45464 - DNA, 20 bp, Artificial Sequence
  Synthetic
gtgagcaagctgacattgcg

SEQ ID NO: 45465 - DNA, 20 bp, Artificial Sequence
  Synthetic
attcagaaaatgaaacagcc

SEQ ID NO: 45466 - DNA, 20 bp, Artificial Sequence
  Synthetic
ttcagaaaatgaaacagcca

SEQ ID NO: 45467 - DNA, 20 bp, Artificial Sequence
  Synthetic
tcagaaaatgaaacagccag

SEQ ID NO: 45468 - DNA, 20 bp, Artificial Sequence
  Synthetic
aggaactttcttcttacccc

SEQ ID NO: 45469 - DNA, 20 bp, Artificial Sequence
  Synthetic
attccagaagcccgttccat

SEQ ID NO: 45470 - DNA, 20 bp, Artificial Sequence
  Synthetic
gttccaatggaacgggcttc

SEQ ID NO: 45471 - DNA, 20 bp, Artificial Sequence
  Synthetic
gggtgctgttccaatggaac

SEQ ID NO: 45472 - DNA, 20 bp, Artificial Sequence
  Synthetic
agggtgctgttccaatggaa

SEQ ID NO: 45473 - DNA, 20 bp, Artificial Sequence
  Synthetic
tagtcagggtgctgttccaa

SEQ ID NO: 45474 - DNA, 20 bp, Artificial Sequence
  Synthetic
ggaacagcaccctgactatg

SEQ ID NO: 45475 - DNA, 20 bp, Artificial Sequence
  Synthetic
agatgtattccgcatagtca

SEQ ID NO: 45476 - DNA, 20 bp, Artificial Sequence
  Synthetic
aagatgtattccgcatagtc

SEQ ID NO: 45477 - DNA, 20 bp, Artificial Sequence
  Synthetic
ggaatacatcttccatccaa

SEQ ID NO: 45478 - DNA, 20 bp, Artificial Sequence
  Synthetic
atgtacaaaggtccattgga

SEQ ID NO: 45479 - DNA, 20 bp, Artificial Sequence
  Synthetic
tccaatggacctttgtacat

SEQ ID NO: 45480 - DNA, 20 bp, Artificial Sequence
  Synthetic
tccaatgtacaaaggtccat

SEQ ID NO: 45481 - DNA, 20 bp, Artificial Sequence
  Synthetic
ggacctttgtacattggaaa

SEQ ID NO: 45482 - DNA, 20 bp, Artificial Sequence
  Synthetic
caaccttttccaatgtacaa

SEQ ID NO: 45483 - DNA, 20 bp, Artificial Sequence
  Synthetic
ctttgtacattggaaaaggt

SEQ ID NO: 45484 - DNA, 20 bp, Artificial Sequence
  Synthetic
acattttctttttcgcattc

SEQ ID NO: 45485 - DNA, 20 bp, Artificial Sequence
  Synthetic
aatgcgaaaaagaaaatgta

SEQ ID NO: 45486 - DNA, 20 bp, Artificial Sequence
  Synthetic
tggctgcacagaagccttcc

SEQ ID NO: 45487 - DNA, 20 bp, Artificial Sequence
  Synthetic
ccactttgcatcagccagga

SEQ ID NO: 45488 - DNA, 20 bp, Artificial Sequence
  Synthetic
ccttcctggctgatgcaaag

SEQ ID NO: 45489 - DNA, 20 bp, Artificial Sequence
  Synthetic
aaatccactttgcatcagcc

SEQ ID NO: 45490 - DNA, 20 bp, Artificial Sequence
  Synthetic
cacaactgcatcatttataa

SEQ ID NO: 45491 - DNA, 20 bp, Artificial Sequence
  Synthetic
acaactgcatcatttataat

SEQ ID NO: 45492 - DNA, 20 bp, Artificial Sequence
  Synthetic
caactgcatcatttataatg

SEQ ID NO: 45493 - DNA, 20 bp, Artificial Sequence
  Synthetic
aactgcatcatttataatgg

SEQ ID NO: 45494 - DNA, 20 bp, Artificial Sequence
  Synthetic
gacggaatgatttctactgc

SEQ ID NO: 45495 - DNA, 20 bp, Artificial Sequence
  Synthetic
acggaatgatttctactgct

SEQ ID NO: 45496 - DNA, 20 bp, Artificial Sequence
  Synthetic
tctactgctgggtttgtcac

SEQ ID NO: 45497 - DNA, 20 bp, Artificial Sequence
  Synthetic
ctactgctgggtttgtcacc

SEQ ID NO: 45498 - DNA, 20 bp, Artificial Sequence
  Synthetic
tgctgggtttgtcaccggga

SEQ ID NO: 45499 - DNA, 20 bp, Artificial Sequence
  Synthetic
agcaaaggacttggccttcc

SEQ ID NO: 45500 - DNA, 20 bp, Artificial Sequence
  Synthetic
agagctcacagcaaaggact

SEQ ID NO: 45501 - DNA, 20 bp, Artificial Sequence
  Synthetic
ggggacagagctcacagcaa

SEQ ID NO: 45502 - DNA, 20 bp, Artificial Sequence
  Synthetic
tttgctgtgagctctgtccc

SEQ ID NO: 45503 - DNA, 20 bp, Artificial Sequence
  Synthetic
ttgctgtgagctctgtcccc

SEQ ID NO: 45504 - DNA, 20 bp, Artificial Sequence
  Synthetic
cacttagcgtgataaacccg

SEQ ID NO: 45505 - DNA, 20 bp, Artificial Sequence
  Synthetic
acacttagcgtgataaaccc

SEQ ID NO: 45506 - DNA, 20 bp, Artificial Sequence
  Synthetic
gacacttagcgtgataaacc

SEQ ID NO: 45507 - DNA, 20 bp, Artificial Sequence
  Synthetic
taagtgtctgagactgacat

SEQ ID NO: 45508 - DNA, 20 bp, Artificial Sequence
  Synthetic
gagactgacatcggaaccag

SEQ ID NO: 45509 - DNA, 20 bp, Artificial Sequence
  Synthetic
agactgacatcggaaccaga

SEQ ID NO: 45510 - DNA, 20 bp, Artificial Sequence
  Synthetic
gactgacatcggaaccagag

SEQ ID NO: 45511 - DNA, 20 bp, Artificial Sequence
  Synthetic
actgacatcggaaccagagg

SEQ ID NO: 45512 - DNA, 20 bp, Artificial Sequence
  Synthetic
catcggaaccagagggggac

SEQ ID NO: 45513 - DNA, 20 bp, Artificial Sequence
  Synthetic
ggacaaaaccagtccccctc

SEQ ID NO: 45514 - DNA, 20 bp, Artificial Sequence
  Synthetic
ctggttttgtcctgaatgtg

SEQ ID NO: 45515 - DNA, 20 bp, Artificial Sequence
  Synthetic
caggaactaacctcacattc

SEQ ID NO: 45516 - protein, 15 aa, Artificial Sequence
  Synthetic Peptide
GGGGSGGGGSGGGGS

SEQ ID NO: 45517 - protein, 30 aa, Artificial Sequence
  Synthetic Peptide
GGGGSGGGGSGGGGSGGGGSGGGGSGGGGS

SEQ ID NO: 45518 - protein, 45 aa, Artificial Sequence
  Synthetic Peptide
GGGGSGGGGSGGGGSGGGGSGGGGSGGGGSGGGGSGGGGSGGGGS

SEQ ID NO: 45519 - protein, 60 aa, Artificial Sequence
  Synthetic Peptide
GGGGSGGGGSGGGGSGGGGSGGGGSGGGGSGGGGSGGGGSGGGGSGGGGSGGGGSGGGGS

SEQ ID NO: 45520 - DNA, 34 bp, Artificial Sequence
  Synthetic Oligonucleotide
ggccaacatgaggatcacccatgtctgcagggcc

SEQ ID NO: 45521 - DNA, 14 bp, Artificial Sequence
  Synthetic Oligonucleotide
gccgtctcgtcccg

SEQ ID NO: 45522 - DNA, 82 bp, Artificial Sequence
  Synthetic Oligonucleotide
gtttaagtactctggaaacagaatctacttaaacaaggcaaaatgccgtgtttatctcgtcaacttgttggcgagatttttt

SEQ ID NO: 45523 - DNA, 17 bp, Artificial Sequence
  Synthetic Oligonucleotide
gtgcacgagatcatccg

SEQ ID NO: 45524 - DNA, 14 bp, Artificial Sequence
  Synthetic Oligonucleotide
gccgtctcgtcccg

SEQ ID NO: 45525 - DNA, 82 bp, Artificial Sequence; identical to SEQ ID NO: 45522
  Synthetic Oligonucleotide

SEQ ID NO: 45526 - DNA, 17 bp, Artificial Sequence
  Synthetic Oligonucleotide
gtgcacgagatcatccg

SEQ ID NO: 45527 - DNA, 14 bp, Artificial Sequence
  Synthetic Oligonucleotide
gccgtctcgcaccg

SEQ ID NO: 45528 - DNA, 82 bp, Artificial Sequence
  Synthetic Oligonucleotide
gtttgagagctagaaatagcaagttcaaataaggctagtccgttatcaacttgaaaaagtggcaccgagtcggtgctttttt

SEQ ID NO: 45529 - DNA, 17 bp, Artificial Sequence
  Synthetic Oligonucleotide
acggatgatctcgtgca

SEQ ID NO: 45530 - DNA, 14 bp, Artificial Sequence
  Synthetic Oligonucleotide
gccgtctcgcaccg

SEQ ID NO: 45531 - DNA, 82 bp, Artificial Sequence; identical to SEQ ID NO: 45528
  Synthetic Oligonucleotide

SEQ ID NO: 45532 - DNA, 17 bp, Artificial Sequence
  Synthetic Oligonucleotide
acggatgatctcgtgca

SEQ ID NO: 45533 - protein, 288 aa, Artificial Sequence
  Synthetic Peptide
MDPIRSRTPSPARELLSGPQPDGVQPTADRGVSPPAGGPLDGLPARRTMSRTRLPSPPAPSPAFSADSFSDLLRQFDPSLFNTSLFDSLPPFGAHHTEAATGEWDEVQSGLRAADAPPPTMRVAVTAARPPRAKPAPRRRAAQPSDASPAAQVDLRTLGYSQQQQEKIKPKVRSTVAQHHEALVGHGFTHAHIVALSQHPAALGTVAVKYQDMIAALPEATHEAIVGVGKQWSGARALEALLTVAGELRGPPLQLDTGQLLKIAKRGGVTAVEAVHAWRNALTGAPLN

SEQ ID NO: 45534 - protein, 183 aa, Artificial Sequence
  Synthetic Peptide
RPALESIVAQLSRPDPALAALTNDHLVALACLGGRPALDAVKKGLPHAPALIKRTNRRIPERTSHRVADHAQVVRVLGFFQCHSHPAQAFDDAMTQFGMSRHGLLQLFRRVGVTELEARSGTLPPASQRWDRILQASGMKRAKPSPTSTQTPDQASLHAFADSLERDLDAPSPMHEGDQTRAS

SEQ ID NO: 45535 - protein, 107 aa, Homo sapiens
IEVMYPPPYLDNEKSNGTIIHVKGKHLCPSPLFPGPSKPFWVLVVVGGVLACYSLLVTVAFIIFWVRSKRSRLLHSDYMNMTPRRPGPTRKHYQPYAPPRDFAAYRS

SEQ ID NO: 45536 - protein, 9 aa, Homo sapiens
IEVMYPPPY

SEQ ID NO: 45537 - protein, 107 aa, Homo sapiens; identical to SEQ ID NO: 45535

SEQ ID NO: 45538 - DNA, 747 bp, Artificial Sequence
  Synthetic Oligonucleotide
gagggcctatttcccatgattccttcatatttgcatatacgatacaaggctgttagagagataattagaattaatttgactgtaaacacaaagatattagtacaaaatacgtgacgtagaaagtaataatttcttgggtagtttgcagttttaaaattatgttttaaaatggactatcatatgcttaccgtaacttgaaagtatttcgatttcttggctttatatatcttgtggaaaggacgaaacaccggggcgaggagctgttcaccggtttgagagctagaaatagcaagttcaaataaggctagtccgttatcaacttgaaaaagtggcaccgagtcggtgcttttttgaaccgacggatgatctcgtgcaccggttcaaaaaatctcgccaacaagttgacgagataaacacggcattttgccttgtttaagtagattctgtttccagagtacttaaacctacatagaaggtgttgggcgcgggaaagagtggtctcatacagaacttataagattcccaaatccaaagacatttcacgtttatggtgatttcccagaacacatagcgacatgcaaatattgcagggcgccactcccctgtccctcacagccatcttcctgccagggcgcacgcgcgctgggtgttcccgcctagtgacactgggcccgcgattccttggagcgggttgatgacgtcagcgttcgaattcgctagctaggtcttgaaaggagtgggaattgg

SEQ ID NO: 45539 - DNA, 81 bp, Artificial Sequence
  Synthetic Oligonucleotide
aatgatacggcgaccaccgagatctacactctttccctacacgacgctcttccgatctsttgtggaaaggacgaaacaccg

SEQ ID NO: 45540 - DNA, 90 bp, Artificial Sequence
  Synthetic Oligonucleotide
  misc_feature (25)..(32): n is a, c, g, or t
caagcagaagacggcatacgagatnnnnnnnngtgactggagttcagacgtgtgctcttccgatctccaattcccactcctttcaagacc

SEQ ID NO: 45541 - DNA, 21 bp, Artificial Sequence
  Synthetic Oligonucleotide
gccggtggtgcagatgaactt

SEQ ID NO: 45542 - DNA, 21 bp, Artificial Sequence
  Synthetic Oligonucleotide
cgcccaacaccttctatgtag

SEQ ID NO: 45543 - DNA, 21 bp, Artificial Sequence
  Synthetic Oligonucleotide
gatacaggaggttggtggtct

SEQ ID NO: 45544 - DNA, 21 bp, Artificial Sequence
  Synthetic Oligonucleotide
aggctgtggtgaagaccttcc

SEQ ID NO: 45545 - DNA, 20 bp, Artificial Sequence
  Synthetic Oligonucleotide
gggcgaggagctgttcaccg

SEQ ID NO: 45546 - DNA, 20 bp, Artificial Sequence
  Synthetic Oligonucleotide
tgatgacgccaacaacgcca

SEQ ID NO: 45547 - DNA, 20 bp, Artificial Sequence
  Synthetic Oligonucleotide
gacaaagccccagatgccgg

SEQ ID NO: 45548 - DNA, 20 bp, Artificial Sequence
  Synthetic Oligonucleotide
ctcccagctccagatacagg
